United States Patent Application Publication US 2007/0054278 A1 - sequence listing, part 98

SEQ ID NO: 97418 - DNA, 911158 bp, Homo sapiens
  misc_feature (1)...(911158): n = A,T,C or G
aatcatgttatctgcaaacagggacaatttgacttcctcttttcctaactgaataccttttatttctttctcctgcctgattgcactggccagaacttccaacactacgttgaatatgagtggttagagagggcatccctgtcttgtgccagttttcaaagggaatgattccagtttctgcacattcagtatgatattggctgtgggtttgtcataaatagctcttattattttgagatgtgtcccatcaatccctagtttattgagagtttttagcatgaagggctgttgaattttgtcaatggccttttcttcatctactgagaaaatcatgtggtttttgtctttggttctgtttatatgatggattacatttattgatttgtgtatgttgaaccagatttgcatcccagcgatgaagccaacctgatcgtggttgacaagctttttgatgtgctgctggattcggtttgccagtattttattgaggatatttgcatcaatgttcatcaggaatattggtctaaaatactctttttttgtagtgtctctgccaggctttggtatcaggatgataccggcctcataaaatgagttaggaaggattccctctttttctattgattggaatagtttcagaaggaatggtaccagctcctccttgtacctctggtagaattcagctttgaatccatctggtcctggactttttttgtttggtaggctattaattattgcctcaatttcagagcctgttattggtctattcagggattcaacttattcctggtttagtcttgtgagggtgtatgtgtccaggaatttatccatttcttctagattctctagtttgtttgtgtagaggtgtttacagtattctctgatggtagtttgtatttctctgggattgttggtgatatcccctttatcattttttattgcatctatttgattcttctctcttttcttctttattagtcttgttagcggtctatcaattttgttgatcttttcaaaacaccagctcctggattcattgattttttgaagggttttttgtgtctctatctccttcagttctgctctcatcttagttatttcttgctttctgctagcttttgaatgtgtttgctcttccttctctagtgctttttattgtgatgttagggtgtcaattttagatctttcctgctttctcttgtgggcatttagtgctataaatttccctctacactgctttaaatgtgtcccagagattctggtatattgtgtctttgttctcattggtttcaaagaacatctttatttctgccttcatttcgttatgtacccagtagtcattcaggagcaggttgttcagtttccatgtagttgagcagttttgagtgagtttcttaatcctgagttctagtttgattgcactgtggtctgagagacagtttgttaaaatttctgttcttttccatttgctgaggagtgctttacttccaactgtgtggtcaattttggaatatgtgtgatgtggtgctgagaagaacgtatattctgttgatttggggtgtagagttctgtagatgtctatgaggtctgcttggtgcagagctgagttcaatgcctggatatccttgttaactttctgtctcgttgatctgtttaatgttgacagtggggtgttaaagtctcccattattattgtgtgggagtctaagtcgctttgtaggtctctaaggacttgctttatgaatctggctgttcctgttttgggtgcatatacatttaggaaaattagctcttctggttgaattgatccctttaccattatgtaatggccttctttgtctcttttgatctttgttggtttaaagtctgttttatctgagactaggattgcaaaccctgcttttttttgttttccatttgcttggtagatctttctccatcccttttttttgagcctatatgtctcactgcacacgagatgggtctcctgaatacagcacaccattgggtcttgactctttgtccagttggagcatttagcccatttacatttaaagttaatattgttatgtgtgaatttgatcctgtcattatgatgttagctggttattttgcttgttagttgatgcagtttcttcctagccttgatggtctttacaatttggtatgattttgcagtggctggtactggttgttcctttccatgtttagtgcttccttcaggagctcttgtagggaaggcctggtggtgacaaaatgtctcagcatttgcttgtctgtaaagtattttatttctccttcacttatgaagcttagtttggctggatatgaaattctgggttgaaaattcttttctttaagaatgttgaatattgcccccctctccgcactctctctggcctgtagagtttctgctgagagatctgctgttagtctgatgggcttccctttgtgagtaacctgacttttctctctggctgcccttaatattttttccttcatttcaactttggtgaatctgacaattatgtgtcttggagttgctcttctcgaggagtatctttgtggcgttctctgtatttcctgaatttgaatgttggcctgccttgctagggtggggaagttctcctggataatatcctgcagagtgttttccaacttggttccattctccccgtcactttcaggtacaccaatcaaacgtagatttggtcttttcacatagtcccatatttcttggaggctttgttcatttcttctcttttttctctaaacttctcttctcacttcatttcattcatttgatcttcaatcactgatacccttttttccacttgatcaaattggctactgaagcttgtgcatgcattaagttatttctcgtgccatggttttcagctccatccggtcatttaaggtcttctctacactgtttattctagttagccatctgtctaatcttttttcaaggtttttagcttctttgcgatgggtttgaacatcctcctttagcttggagaagtttgttattaccaatcgtctgaagctttcttctctcaactcatcaaagtcattctccatccagctttgttccattgctggcgaggagctgtgttcctttggaggagaagagctgctctgatttttagaattttcagcttttctgctctggtttctccccatctttttggttttatctacctttggtctttgatgatggtgatgtgcagatggggttttggtgtggatttcctttctgtttattagttttccttctaacagtcaggaccgtgagctacaggtctgttggagttcactggaagtccactccagaccctgtttgcctgggtatcgccagtggaggctatagaacagcaaatattgcagaacggcaaatgttgctgcctgatccttcctctggaagcttcatctcagaggggctcccagctgtttgaggtgtcagtcggcccctactgggaggtgtctcccagttaggctcctcggaggtcagggacccatttgaggaggcagtctgtccgttctcagatctcaacctctgtgcttggagaaccactactctcttcaaagctgtcagatagggatgtttaagccagcagaagtttttgctgcctgttgttcagctatgccctgcccccagatgtggagtctacagaggcaggcaggcctccttgagctgcagtgggctccacccagttcgagcttcccagctgctttgtttgcctactcaagcctcagcaattgtggacgcccctcccccagccttgctgccaccttgcagttcgatctcagactgccatgctagcagtgagcgaggctctgtgggcatgggaccctgtgagccaggcgcaggatataatctcctggtgtgccatttgctaagaccattggaaaagcgtagtattagggtgggagtgtcccgattttccaggtatcatctgtcatggcttcccttggctaggaaagggaattccctgactccttgcacttcctgggtgaggcgatgccccgccctgctctgttggctgcacccactgtccgacaagtcccagtgagagaaacccagtacctcagttggaaatgcagaaatcacccatcttctgcattgctcatgctgggagctgtagactgcaactgttcttatttggccatcttggaacatccgatatataacacatttttataagttacttggtaaaattgtttgaaatgactgttgtaaaaagtgaaaaaaaattaattacaaatctcaatattcctgaggtacaatcattatttcacattttacaaattaaatgtataaaacataatacacacactacaccctgaacagtaaactagcagtaatgtttgagaggaaactatttaagtaactgaaatcgtttatacagattaaatttataattcacaggaggggaactccattcatcctagaaggctcagcccgtggcacccctcctgtggtggtttctcccatccctatttccccaggcacaatcagatttacagccctttctgctcccattgcacctattccatgctctatacctactgcggaattgtatgttaactctttgcctctttacagttcctcctgcccccaccagtcgactatgagaacctttgttttatctactttgattttcctgtccttaacacagtgcctaggattcatacattgattggacaggattttattgtcaattatgagcaatcgtatgaccaagttgagcaagataaaccctgctctagattagactactagttcacagtctagtaggggagaaagtatgtacacgaatcattaacatgcagagtgatacattaatgaaggtatataccaggtagagcagtgactttgcctggggatgtattcctgaggaagtaactagtcagctgagctgttcaacaagcattaggcattaactctgctggtgatgtgctggatggctagtgaatagaaaattgaatagaaagagcatttaccttccctccaaagatatacaatcttgaatgaatagttcgagtaacaatggcacgggtagtcaataaggtagcaaggctgatagccaatggggtaaactgttaaaatattgaactcttctataccagtggtaaatagcagtcactaccagcacctgtctatttgttctttactctacctcccctcagtactcccaatcccctcctatatgacccatagaccctcctgtgttccagcaagtaaagagtcaatacccttatgtactaaacattttacacataattccaagggatgcactttgccaagaaagaaaaaaattacaagctttgaaatagcagtatttggtaaactgcagttaaaagccagggtatgaagttcgagttggggaaaagagaaaatggaactgaagaattgagaagggcaatgaagagccacagaaaaattttaagcagatctgttttaaaaaaaattctgtccaacattagtatgtaagtgctcattaatatttgttgaatatgattatgctaataataatttacacaaacctctaaccaatgggagaaaaagaagctttcataaacatggacttagatgcagggaatttattccattatccatacaaattacagactctatgattctactgtaactttgcaattggtgatttcagtattacagacgtgaatactgagaaataattaggggaagaaaatcaaacgtggctgatctggactgttttttcttctatttcactcagaacttttaaacacatagtatgactaaatgcggataaaggggtttacccatcattgtgaataggcatgagatcactcagaaatgttggattacaaagggccaataagaaaggcttgactgtatgcaagtgtcgacagaatgggttctccattactttgattccttattttcagaagagataagaaattcctcattaatggatgtactcaatgagaattaaatactcaaaacaggaccttagcaaatcattgttttattttaacatcactgtttactgttcttcctaactggcagttactcctttgtagatagtacaaatcacaatgtaattcccatcattatgtgtataatatgtgttccttcttgttctaccttaacagcaagtgacaaatacatcatttttattgaatattaattttcaatttatttcagcagcaagcaccaaaatcaaaacccaacaatcaatataataagtatatgtaacaaataatctgaaattcagccccattaagacatgtgggtgcaatatttttatattcccaaaggtctgcatattttgggggcattaaacaacagggaactaaaatttaacacaaaatcaggtgccatttaatactgtttaacatttgaaaattatttatttaataatacagatcgtyttaatgtgcygtaaatatttctcgcacagcatcatattgtcagaagtttttcccttttggaggcttcttttttccattcctttccagtaactggcctcccaatgccagcaactcaggtagattcatgcagtcattcctcttctctctgtactggtaagcgctctggaggaagaacagattccaatttctgccagcgctctgggggccacaggatatgtgtggcatgggcatgcagaagtcctagggaaaccttaattcatgagaaacagaaagaaagcaataaagagatcattttataagaatcattattaatagcttgaaagcagaatttaatccaggtttaacatcccagggagaagtgatgatgaataaaaaaaatagtaaacaccttttgtagccattgaaatacaaagaaaaatacagtaagcacttatatagcatttttctaggtgctattgtatataaactcctttaatcctcacaaaaaccatttgaagtaggttctgttagtatttcccttttagaaatgagaaagcaaagctcaaagaggttaaaaaatttgccaaaattcatacagctaccaagcggttagtctgtgtttagaaccaagcagtttgactcgagtccaccatcttaaccattagcctcaagagcctatttgcatagacccaggaagcataaatctggcgtatattctcagagtttcccgcagagtcattggtatcctagagagactttctttatggaaaaatcacagagtcctaaaaaatatatatattttgtgaaaaacattgtcccacctactagatgagcagcaggagttaggtgtgagactgggtgggctgtctccatggagagtacactgagtaacacggatctagtactcatggagagaggtggaaaacaaagagaaagcaaacaaggtgggatgggtagcaaggaaaaataataaagtatacagatcatggcagatggtaaagaatccccatcagcagaggcgagcagagattggcgaggatggaagaggaggtgagggggaggacttaaggctgagcccaaagacaggaagggagcccttaaacatcttaaatcttaaagacatcaatttcggtgaacaggagaacatagcaaacttgtttaaaaggcagatcagggtcttatcttaagagattacccttcaacaggtctgaaggagggcctggaaatctgtgtttttaaaaaaattgttgttgttatagttactatcaggtgatattttaatggtatttagaagcttacaaaatacactcatatttagcacatatttactgagtgccggttataaagtaatactatatgtccactttatttaccattttattttcaaatgtttttcctataaactggacttccacagagattaacataaaacattcctttcactgaagctcttctatttgctatcacatgaattcaggaaatctcttctatttgctatcgtaygtattcaaaaaaatcacattgtctagggactcgaagacggaactggatgtcagggaaggcttccaaaaagataatcaaaaacacattgtttacacagaagaagaagaagaaaaatcttttaacaacaacttgaaatacaaactaaatattcacgaagggtagcaagaagcccttgggctcaataaagggttcttttttttcttctacttgttattttgaaaatcagacctgtaaaaaatttgaaagtgtggtacaaaaaacagctccatcaaaagtaagcatttacattttgctgcattcatttttttctcattttatgtgtatgtacatatatgagacatgtacacagctacttcttctaaactgtttgatagttgttgacatcatgctaaatttatccctgaaaacttcaacatatatctcctgagaatgaagaccgtttcatatatgaacatgataccattattatacacaagatatttaatgtagatacaatattacttattacatagttcatattcaaaattttccaattgtcccactgatgtcttctatagccattattttaaaaattcaaggtctaatcaagagtcacatattgcatttggtggtcattattttgcttcggtttacatttaatttcttttaatctggagtcccagcaagctgccttgtaaaatgtcatatatctggaattgcttgattttttttccctcatgactagagtcaagttccatcaaatcaggaggcacaaaatatcggtgcatctcattgttgtgatgccaagtttgatcacttaaggcaatattgactagatttctccatcataaataaatctttttccttctgtaattaataactgtgagatattttgtaataatgtaaatatcctatatgccagctatatttcatctaattgtgttaacattcattgatgatcctgtccgaatcacttattacattagggattacaaaaataatgattttccaaatctattccttcttttgcatttattagttggcattgttctcttaaaaaaaaagtgctttccctttcaccctaactgcctctattgtaatatcaagaagtcctttttttaagtcaaaatctgtgactactttttatttatccgtttgatgctcaaatgtcttaagtttggccagtgggagctctatgtgtcctttggatacatctccatcagtattttagcgctaccttactttttggcactattagttgttacaggcttaccttgcacctaatacctgctccccctgagatcagacatttctttaaagtgccttggtttcttgtttgtttgtttgtttgtttgcttttgagacagagtctcactctgtcgcccaggctggagtgcagtggcgcaatctcagctcactgcaagctccacctcctggggtcacgccattctcctgcctcagcctcctgagtagctgggactacaggcgcccgccaccatgcccggctaattttttgtatttttagtagagatggggtttcaccatgttggccaggatggtcttgatctcttgacctcgtgatccaccagcctcagcctcccaaagtgctgggattacaggtgtgagccaccgtgcctggccattatttagaaaccaaggtttagtactaggtgtgctcagtgctcctggggtgtcaatattctatgccatttcagggaatacacataaaaaatccaataccaaaaagttctccctcaccttccgcactccatattttatctcccttcttccacagtgattaccctggctccccacaacattaacacatttattcatttatactttcctaaaatatactcaaaatagtttcaaggtgactacactacaaccattaccaacaataaatctgctgagtacaaattaagatgtctgtgtaattattttagtccttaaaatatatctcagtttaagggtgtacttgtaggccggagtgcagtggcatgatcttggctcactgcaaggtccgcctcccaggttcatgccattctcctgcctcagcctcctgagtagctgggactacgggcaccagccaccacgcccagctaattttttgtatttttagtagagaggggtttcaccgtgttagccaagatggtctcgatcttctgacctagtgatccatctgccttggcctcccaaagtgctgggattacaggcgtgagccactgcgcccggcctggaataaattcttttttttctccccagtatagttatgttaccatttgatatagaggtaggcttatttgtttctatttatactcaattttagagtttgctttgattacccatttttgattccattttatttttgaatatatataaatttacatcattcaaaagttaagattattttttaaagatgtggtaggcagaatgatgcctccccaccaccgtcctggcaaaagatgtccacatcttaattgccagaagctgtgaatatgttagagaataaagaagaattaagatgctaaccagttgaccttaagataacaagaatattctctattattttatgggcctgaatgtaatcacaagggtcctaaacagtgaaagcaggaggcagaagggtcagattcaaagagatttgaaaatgcagtgctgctggctttgaaggtgcagaaaaggaccatgagccaaggaatgcaggcrgcctctcgaagccagagaaaggaaggagatgaattatcctctagaactttcagaaggaatgcagccctgctgacatcttaactttagcccagtgagacccatattggacttttgacatccagaactgtaaaatagtatatttgtgctgttgtaaggagatacatttatgggaatttattagatcagcaataggaaactgaaacaaaaagtatacaaagagaaatcccattcccatcttccaccccatccgcaataggtaactaattttattagtttctggtttgttgtttctgtgtttcctttttgaagcaggaaaaaagcaaataaggatacatacatattcctttttcccttttagacttataccaaaggtaacatgctatattctcttgtgcaccttgcttttactctcaacaatatatcctgtaagctacctctattacttcatagaaatgaagtctgtgttttttttttaaagtctcctcaccccacctaaccctagtgattctgctgattactcagttggggaatctaaatctgtagtttccactttgtttcacgtctggaaaaggtaaacctaatcaaccttaaagaatcccttgaatgtattccagaacatcctaaaaaaccattccatctatgttaacttccaggaaatacttccctagacctaagtgatctgtcatattgcagtttttatccagttttgttcttatctgagctcagcagagttggaaaacagctggtctccatctcttctacaataaccctttttaaaatttgatagctgctactcagatgtacctcaagcctttatttgctcttcaagatgtttaactttgtttcataagggtgatttgccagtcttctaacttggctgaactcttgccaatatatctgctcgcttgcttagctttggactcagttttgggcatagtgattcaattttttttaaatcaacactcattttaccaaaaycaatcttagaattcttttattttaaacatttattaaggctactactcttgcttcctgaaaaaaataattcatcttcacaatgatgaatgatgagaattctatcagataacatcaatattgcttcaaaacatggtatgggaatgcaaaattcagggtttcttttttttaatattgagaataatagagagagagagagtgtctgttcatcctccatagtgtcttgtcatggatcttcattttttaaaattgatatgtctataggcaggcaaagagtatagtgaatatagaaagataaaaatccagaaatatatgaactttgtaaaaattaaaaattatccttcaggtacagttttgacttgcatactggctgtattagttaggttctccagagaaactgaaccaacagtrtgtgtgtgtgtgtgtgtgygtgtgtgtgtgtgtgtgtgtgtgtgtgtgtgtgtgtrtatatgtatatatatatatagagagagagagagagaaagagagatttatctttaaggaattagcacatgtgattatggaggcttggcaagtccaaaatctgacaagggaggtcagccgactggagacccaggaaaaagttgcagttcgttgcagttcgagtccaaaggcagactgctggtgaaccaggaagagtcaatgttgcaggtgaggtctgaagacgatctgctggtgtgttccttcttactcaggggaagtcatcctgttgttctattcaggccttcaactgattgaagaggcttacccacattacagacagtaatctgctttactgaaagtcgatcaatttaaatgtaaatctcattcaaaagcacactcaaagaaacatccggaataatgytcgaccaaagatctgagcacactggcacagccaagctgacacataaaattcaccatcacacttgacatatacaatcctcctgctctttgcttactcagtgttacactcagtgcttactctatggagggcagtgttctgaatgacttacacatactgactcatttaattcttaaaataagccatggggtaagtactgttactgcctctatttcgtagccgaggtagtgtaggtgcagcaatgtattttttgagctgagactcaaatgcatgaactctggttctagaagctttctatcaggatcaccatatcattcatcatccaaatgaaacacttctggcagtccaagggggtgctatttttattaagtcaggataataaaaataaatcaggactgtccttgacaaataagaatatagttgccctaatataattgcttctcaatactgctaggtcccacgttctttcctgaaaaaatagactcatcaataagtaagtacacattgttatgtgctaaattgtgttccctcaactttatatgttgaagtcttaactcctaatacctcagaatgtgactgtatttggatatggaaactttaaagggatgattaagttaaaatgaggcctgaaggcaaccggattagtgaccttacgagaagaggagattatgacacacagagaaacaccagaagcacatgtgcacacagagaagttcatgtgagaacatagcaagaaggtggcatcaacagccaaggagggggactatagaaaaaaaccaaacatatactgaacccttgatcttggacttctagttccagaattgtcagaaaataaatttctgttgtttaagccacaatctgcggtattttgttatgagagtcctagcaagctaatacacacatgaatttaaaaaacgctacgcagccgggtgtggtggctcaagcctgtaatcccagcactttgggaggccgaggtggacagatcacttgaggtcaggagttcgagaccagcstggccaacatggcaaaaccctgtctctactaaaaatacaaaaattagccagatgcagtggcgcctgcctgtaatcccagctactcgccaggctgaggcagaagaattgcttgaacccaggagtcagaggttgcagtgagctgagatcatgccactgcactccagccttggtgacagagcaagactccgtctcaaaaaaaaaaaaaaacaaaaaaaacaaaaaaaacccctaaacaacacagtgctagaagtcaggtccatgaaatgtcctaatactgactcctcaaaataggggaacaaagaaatatgttgagagaaaaacaaaacaatttttgctttgaagaaaaagagagagatgctaaagtataaataactcttccaataggttaaatactttgaacaaccaacctaacatcttattggaacttgattctcccctttccttacttatttgtgtcccatgtgtaactgtgtctccttcaatggattcacatttttcaggtataagaaagttacttttacagtaaatttcaaaacacaatagcaaaagcatattaaatgaaccctgcaaccttgagcagatcattgcattttcagtatctattgaatgtgaagataagttcacctatgtgtcttaatagaactcttgtaataacttgcccctatggtagagtgggagggcactgagcccacagattggaaattcataatctagaatagtagtcaccaaactgttttgattatgcatcagcagaaaatttgaggattcatccctattatttatgttaaaattacatatatgctattaacaatccataaaatcaaatgttaatatggcttagattcttattttagatacaaatagaagttctaattttttttcttgcctcccatggatcattgtattcactacttgaatattcctgcttcccactttagcaatctctgttttaggaaacaccaaaattactggctggaaagtgatccaggatatcagtcaatgggtttgttttgcccacacaatgccaacgaaccacatggactaaatttgcactgaattgcctgtctttgattgagttggctccactgagaagttattttggcatctggtagacacagtcttcatgagcccagcctttccttcagatgccagggggacagatgtgtgtggcttttgttccctcccctccctttccacaaacctatagtctacctaacactctttcatttcttggcttcaggtagtttcaccctctcttgagggaaaggcttgcaaggacaagataaggacaagcaaatgcaaaagagccttgagttgggatagaggaaaaaacacaggaaagaaaatcaggaagaacaagactgttagcgggaggaaagacattttttaaaaagatgttcaggcacttctaccatgtgaggggccctcaccagatgctgaatttgctagccccttaatcttggatttcctaacctccagaactgtgagcaatacatttctgtttagaagctgaaaaaaacaaaacaaaaacaaaaacaaaaaaagattttcagaacttgtattattccattatcatgctgctaataactaataaagacatacccaagactgggtaatttataaaagaaagaggtttaattgactcacagttactgtgaggaaacttacaatcatagcagaaggggaagcaaacatgtccttcttcacatggtggcagcaagcagaagtgctgagcaaaagggggaaaagccctttataaaaccatcagatctcatgagactcacgcactatcacaacaaaagcatgagggtgattgaccccatgattcaattacctcctactaggtccctcccatgacatgtggggattgtgggaattacaattcaggatgagatttaagtggggacacaaccaaaccatatcattccacacccagcccctcccaaatctcatgtcctctcatttcaaaacacaatcgtgtctttccaacagtcccccaaagtcttaactcattccaccattaacccaaaagtctaagtccaaagtctcatctgagacaaggcaagtcccttccgcctatgagcctgtaaaatcataagcaagttagttacgtcctagatgcaatgagggtacaggcattgggtaaatacacccattccaatgggagaaactggacaatacaaagggactacaggccccatgcaagtctgaaatccagtagggtagtcattaaaccttacagttccaaaatgattctcctttgactccatgtctcatatccaggtcacgctgatgcaagaggtgagctccaatggccttgggcagctccgtccctgtggctttgcagggaacacctccccttctggctgctttcatggggtggtgttgagtgtctgcagcttttccaggtgcacaatgcaagctgtcagtggatctaccattttggggtctggaggatggtggccctcttctcacagttccactaggcagtgccccagtggggactctgtgtgagggctccaaccccacatttcccttccacactgccctagcagaggctcttcatgagagctccccatctgcagcagactccttcctggacatccaggcatttccatatatcctctgaagtctagatggaggttcccaaacctcaattcttgacttctatgcatctgcaggcccaaccacatggtagctgccaaggcttggggcttgtaccctccgaagcaatggtctgagctgtaccttggcccttttagccatggctgaatccaaagcatctgggactcagggcaccatgtcctgaggctgcttagagcaggtaggtcctgggcccagcccatgaaaccatttttccctcctaggcctccaggcctgtgatgggaggggctgccatgatggtctctgacatgccctggagacattttcctcattgttttggcaattaacactgggctcctcattacttatgcaaatttctgcagctgggttgaatttttcccaagaaaatgagtttttcttttctactgcatcatcaggctgcaaattctccaaactttctactctgttacctcttgaatgctttgctgcttagaaatttcttccggcagakatcctaaatcatctctctcacgtttaaagttccacagatctctagggcagggggaaaatgccaccagtctctttgytaaagcataacaaaagtcatctttgctccagttcccaacaagttcctcatctccatctgagaccacctcagcctagattttattgtccatatcactaacagtattttgctcaaagctattaaacaagtctctaggaagttccaaacttccccatatcttcctgtcttctgagccctccaagtctctaggaagttccaaactttctcacactttcctgtctttttctgatccctccaaactgttccaacctttgcctgttacccagttccaaagttgcttctactttttggggtatctttaagcagaaccccactcccagtaccaacttactgtattagtccattctcatgctgctaataaagacctacttgagactgtatttacaaaggatagaggtttaattgactcacagttcagcatggctggagaggcctcaggaaacttacaatcatggcagaaggggaagcaagcatgtccttctccacatggcagcagcaaggagaaatgtcaagcaaaagggggaaagccctttataaaaccaccagatcccatgagaactcagtcactatcatgagaatagcatgagggaaactgcctccatgattcaaatacctcccaccaggtccctcccatgacacatggggattatgggaactataattcaagatatgatttgggtggggacacagccaaaccatgtcagaactagagccagggtcagaagatgatcaatgtcaggtgtgaggaatgaggtgaagcacaacacttttaaatccatttgattaaaatattttgtaagcaggagaaacaacctgcacttttagcaaataaaatattttgatgaattttacttagcagcgtaagaagagagagaaatttccaaataaacaaagcagcagtcagatgatatttattctacaatattaaattacctacaattatgtttgaaagtcaaaacgaactgaaacaatatccaaaatttgaaatgttgttctaaaataagtactgatttctcaatgcttaaagaaatgtcagctctccaatctgatatcaaaggtccttcacagtcacatccttccaaactcatcttcatgatttctcagtacaagtactctactctcagggcctctccagagcacctacaacaggacataccatatctatctgcctgcttctgattactgttgtccttccagtttgtaatcctcttccttagatccctggatctctcttgtaagacccaattcagtcctgactcttccacggagtccctcccagccagtccaattcatatccatttgttcctgaccaaggaatcaaggcctggtatagggtctccccaatatccagttctacccaatataaagatcaatatatttgagttaaatatattttttataaagtagcacaactcttattttcttgacctcccacctttggatccagaggattacacagctatcatccagtgttttctcttagaatgtataaggctagtggtgagtataaggctagtgaggtatcatcaaaagtggtgaccccttttggaccataacttatctgccagtgatccctaccttcaggtccttgtttaaaggggaaaccaatggtgcaggccccaacttaattcaaatgaacaaaatgagcacagtagtggctacatcctttgtcaggctcaaaaaaaaacaggctcagttctcccatagtttttctccccccaaatgcaaccgtatttcatcaaaggcagaacccactcctcctgggcctcttactgcaaggttgtcgcatcagaaaaccaattttcttctcactggtttagttatttctaagtctccgtaatgagattttgaaaacattaytattgggttaataaatgtttcttgcttaaaggaacaaagtttaataatataggaaccaaaacgtttgtgtggttaggtcagcaatgaccaatacaaagtaatttactttcttatcatagtacttacagctttaaaataagttttaaataaaacttacagttttaaaataaatttggttcctcatcaaaataagataatcacaaatgaaactttaagaaattccctaagcatagtgtgaccatgcaatctattacccaaattaggacacttaagagtgaagggggttattaataattaaactgggacagcaggtgtaaaccaaggtggctctaggatatatagtcatcctacttatgtgtcatcctattattttgacaagtgaacatttattgactattgttatactctgagggccttacatataaataacctctcctactactaaaattaaacctgcagtatagatattactaattgcattttgcaaaagaaaaaaataaagctcagaattactaagtaacatgatgaaggctgtaaggctagtaaatgatagaagcaagatttgaaataggcatggttcaaaattcatgctgctcccaccataaggtactgtttcttctgtgatgtyatgtaataatttatgtttccatctctatagcaagggtcagcaaacatttcctctaaaggatcagacagtaaatagtttaggcttacaggccatatgatctctgttgcaactattcaactctgtacttgcagcacaaaacaggcatggacaatatgttagcgaatataacatttgttccaatgaaacttgatttacaaaaacaggcagcgagctgtatttggcctgagggccattgttcagcaacccctgatctatactctagaccctataatgtctctgattggacaggcagaggttctagctcaccttttctatattataaattagcacggtgttttgaacaagattgggaactacctgtcagcaataagcatttactgaatgagtgaattaaggaggaaagcttgtttggaaatgctgtattttattatctgggaatcaaggaaattccttaacctacattaatggaaacatctacagttcttcagaaaacagtattaagtaacaggagggtttccataatcactgatgatataccacaatggattgacagcaatctatccctacaaagaactgtgagacagtctcaaaagtatttttaaaaggtagaatatggaattccctagtacacttcctggtactgcactgacaacatgccccaattctttctggattgggtaccacaaaggaggatgttgcccttataatcactgctgagaccagatctgtgagtgccaaagagagagcaaggtcactaacaagaagcacaggacttcacttgcagcttctactgtgacgtcacgcattcaacatgatgcaacaagtggagggatgtcttgacagtacagagacactgctttcctgatcccacctctctggtaaccattttttgctcatgtcaatattacacatgaacaataacaaccataataaaggcacaactttaaaagcaatctaagagactaagaaaaagtgagaagaacaaaatgattcctttaataaatagcataacattgagatttcttgtggatgccagcgaaacagatgcatggtttaagtaaatcaaacagaattagaaataaaggcaggtaaaaccaaatrtcacatggaaaaatgagcaattgcactgttaaaaattatcaaaaagatattttttaaaaagattaaagcatataaatgatgctccctactttatttttaaacatgtattaacatatccatatttgaattttttcaccaacatttttggatacaggagactaggttcgtacagagaacagtattagcctattatctacttacacattcccacgatgcttatctacacagcatacagaacggataaacacaactcctaataaaacaaaggcatgcacacagaatgcttccattccacgtaagcactgactgatatgcactcaaagacaacctgataagagcaaagctttgcttgtttaggtgaatgaggtatgtgagcatcacgtgccaaagaactatgctgaaggcaaacaagaagagcctcaaaactcctaagatctaagctttggtgaggcaaaaaggataaaagaaaaaaaaaatagatagaaagcaatggaggagtggagaagggaggctctggaaaaaaatggatagataggttagtacagggaggaaggagcagcagataagctaaaaggcacagagtcaggggtggcacaatgggtgagctttctttgtgggaaatgagctactgagattgccccctctggtatcaccatcctgtgagaccctagcagtagtgatagttctggaagcaygctactctgcagaaagacccagcatcattttcttcatcctccctgaactcacaagagtaatggcccttgcacctaggaatatttcctgtagacaagaactctttccttcctgaagatataatacaggtccacagtaccttactagcaattctaaaatcgaaagagttccaaaaatatgaagttttctgtaaccctctggtagcaaaatctgacctgacctgagctgctataaaattgtagtctatttatcccacagagtatgccaattcatacttctggctgcagaaatattaatgtgcttgattctagaagctgccccagtctctgctgggggtattatgttacatatggcatagacatagtttaaatatgctgtttatagatactgatatcacctttccaacagctaaaaagtctgaattstgtactataagtttcctagtttcagatgtgatattaacatctttaaatataagaaaaggtgaatatttaccaaagagaataaatgtaatcagagacataggctcaatcctaggtggcattggcaccctactagatgctgraaatatacagaaggtaatggacatgatccctgtcccttaggacctcatgatctggtgggaaagacagatgtttaaacaaagttttgaactacaacctggcatgctagacatacaaaggagccaagtaccccgagagcagaggttgtggtcaagccttggaaaggctccactgagcagattcatcaaagttagctctaaaggatgctgctgacttcactctcctaagggcagatcttcacccatgatatcccttgccagatttttatctagaacattctcctaatctttcattaatttcaaaggtgagataatgtgataggktgatacaatgcaatattttgcaatttgaaagcaaagccctatggtttggaagagattcgaaatgagactctctctttcaaaggcctcattctaggacaagtgttttccttcattaccaacaattttaactttaatcatttcaaagcaattttcctgttcaagactcagctttaatcagaatgcattttcaggtcactccatagcctcttcatgcttctctctagataactacagaatcatgcataatcattctagtccccccaagacaccctcagtaagttcaacattttatgcaaaaatagatacaaaacaggcctccgggggtatctccagctaattttcatgaattaatttcccaggattgatgtttatgcaccagtctctttaccacataatcaaatcactggagttgaagtggtctaactccttattttgcagcttgattaagcaggtgatgaaatacttgaatataatttggatagttaacagctcacactattcaacaataatccaaggtggatggatgacattaccaaccgatgtctcattgtttgcttgttttccttctagtagctgacgtcccacatgttatttttatgttggagataaaacagttcatataaatacatgagtggagaggtgtgaaaggctttaatattgatgatgttgttttaaaccacatttagaccaactgggcaggcagccaccgagacagactagattgccattggttaagagaggatttgggatgacaacgtatctggtacccactgccaatcccgctgctgtggtgaatgcagctattcctctgctggggttacctctgttcatctgggtggctatctggcttccagcctctatctaaacatctccctctacttccctttcctcttttgtctctactttcaaaataaaaggagagaggcttagaaaataaacaaccagaaatgaaagaagataaataaaagtaacaactacaaagaccaagatagttgctgtgactagcaccatatctggtgctatgtgaagaagacaacaggctgacttacacagctctcatatgagaggacacttcacatttttaaagagagactaacattttctctgatttaatttttgcaatacaattctaacatagggtctagtacaggacactckaagtatcataacgaacaatattcacacattacgtttccccaaaaaaggcagaaacagagttcaagttgctggcaatttggtgaatattattttgcatgagactaaggtgacttggtcttctatgtaatcttctagtcacctaatttattccaatgataagaacttagattacacagaagtttagataggtaggacgcccttaacattatctttgttcattataatttttctcaaccgtgtttttcatatataagatctgttctaagttgtttgtggccagagacaattcctgattccaaactattgctacatgtctgcaagtgaatgatgagctagatgagtgatccactccactctgcctgtctcctcaccctagaatgacacttcgagtggtcagagctataactgccgttcttaatttacaccagaaaatccagaaaattgtgttgttgaagacaaaataaagcataataaaaggtaatggaaaaagtggtctaaacccgagaaaaactgacttctcaagaagaaacagatctagcatgtgcttgaagttttaaatgtgcacatggtgaaggaagatttacctcactgagatcattacaggtgtgggcatggcacaattggcaacaccagtcttaataatggctgcctgtctgtccaagtgtctgtgaaaataaatgtcttcttctattgcctactcctccagcaaaatgatycagatattccttttctccactcccagcagctaggcggaagcacctgacctgggcccagccaatcagatgcccacacctaggaccatgaacatgaaaggagtgatgtgaagacacagaaacagagattactggcagagacatgagtgccagaaagtgtccagaaacaccaatcgccatcctccctgccttgctcttgtggagtggcataggggtgtgctgtgttcctagctgtgaaattcccaagcctagttttcgttgcaatttttctgtaagctggccaatattcttctaattgcatcttttcttctaaaattagtaaggattaaaaaaaaaaacacaaaacaaagtgagaatgggtttgggttggtaggctgatgtggaaatactggtgaaagaataatgtttataaggagattagaaattaactctaattcctaattccacaggtgggaaaactgaggcccagaaatgctacccagatcactcagttagctagagatggaacttcaaaacctattactggctcttaatttgaagcccttttcactataccgatcagtgaaatgaggtatagaaccctagaaattgtaattttgttaagggccctgaatccatgctttctacacctgcttttaccctagggaaaagtgaggtctttcattttctgcagaaaaaaacaaacattgcacatgaaggtttgtacacagccatgccactctgttttggaattgttctgacttgtagcagcagggcatgtcacaagccactgggctgtaaggaacacttgctgagggcaacaagaaaactagtgattattacagtaacttggctacatcaatgtgcataaaaggccctgaaaaataaagaaatgtggttactctttttactcaacacaacagatatgcaaaggcctactacatgcaaagcacactgcaaggtgttctatttcataaatgtaccaagctgtgtgagacacagaatcaggccttaaaaggcttataattcacagaggaggatggttgtcataagcttgacccatgcaatgtgtttggcagaagtggagaagaggttgtaggaattgagagtaatctagtgagtaattcaagccattgaaggatcaggaagagagacaggttctcattggggaaacgacctctgacctcaatctgaagaaaaaaaaatggcaagagagtggtcagcaagagaacagtcaggagttcttgtgatgttgctgacaaaagatataatcatgcataggaaaagaagaaagaaaaatgtgttgagattgaaatccaactttcctagtgtggcatccaggcccttcataaatgttcctctgttctgtttcatttctcagcactcatcagcttgtagtccgaatcactcttatgcctccttgaaaactctcagatctctcacagcacactctgatctctcacagctctggacatttgtacatacttttgtttctgcctcctggaaggctttctcttgctctttaccttgataactcctcttgacctttccacacagtgcctacatgccacctccttctggaaggcttccatgacctcttcccagtttcaacagcttgtgaataattctaactaataattatcatactgggcagtgatggtctatttagttctttctctctaccacttgtgagcttcttgaagcaggcactgtctcgtattccaaatacatgatataaaatggaaagatgctcaaaaaagtttgtcagttgattagatgaataaatgaaactggagaaaatgtagattggacacaactcagcaactgattggatatgggagctgagaaaagaacaaggtgatggggggatgatcattgcttctcacccgcctggaaagatggtaatgccatgaacagtcacgggatcacagtacaaggagcagatatgggaaatgatgaattcagttttstattattgaatctgagagtcctattgaatgccacagaagataccttgcatgtggttgaaaattctgtgcaagagttcaggcaagggtgtgaagtagaacttagagattcaggagttacccagttgcacccatgggaacacagtgctcacagagggaaagagaagaaagcaagagcactaagggcagatacctgggggaacacagcatttcggaggcaatgctagaaagctactgactatatgcaagaatcaataaacttgcttgagtaacacatccacccttaaaccagagctcatgagacttatgtacaagtagagaagcattgctctgcttataaaaagggggccattgagattagtgcacaacaaaatacatcagataagatgagtgggggaaatacttctaacatcacctttaaaactgcagctatttgggtttttttattgctgaatttatagaacatataaagttctagataatacctcttaaaatcctgaaacttatgttcaggtagtgcagttatacatctgtttatatgcatatgactcatatacattaaatatataatgtaaaacctctcagtagcttaattaaaatatctcctctaatggaaataaacgttgttactttatgaacattttgctttcagaagggtaaatgcaatactttatataatttttagctgacttttaaatgaatttcacaagcttttaataccactttggtcagaaaaaaacttttgtttagtgaaacaaagatgctaccaaaagtggctaatatgtatcatttctgataaataattgtaaagcttttactttaaatattatgatctatctgttcactttttatcaggtcaactaataagcgaattaaagcaaaagacaagaaatttaaactatcatacagatttttgctacttttattttttgtaaagactcaatctgtcctcttcagaaatcatcttgttaataaagcatagtttgaatgactaaaaagtaatgttactgtgatcatgttaaaggcatattggtccaatgtcagtcctagtattgacatttagtccctgaatatatagacttcattgttgttacattaggaaaagttaagttaatggagtcattccagctttgtatactttctattgactctgtgatttttttctttttcagatttgagttcctacaaataatagttattttgcttttctactttgattacagtagttaattcagagaaatctgtttagggtcattcaacattcaatcaataaacatggtggcagaaggccatggctgggatgctttgtaagacatttgaatttccatatactgaaattgctaagagtaaataacatggagtcttttgattttgaatgtgcacagttattgtctgaaagttaatagtagattatttaaagttgaaatttataaaatgacagatgagccatgtcaaatataacatagtagcaataaaataaaactggtagagctaccataaaccagaagaaattcctcatggctaactatggactgactacttgagagcagtttatttacaaaaatttttatattccaagctgttatttcctaaagtagactgaacagcaataagtcttaattctttttcgtatgttgattatgtatatgccagagaaaaggttgatcattttaatggtagcctaaggcaagtataatgacagagacaaattaattttttagagcaatgttataaattaccttgagattaccctctggtatggattatatataactttactccactgactcagatagttcagtgctagctctaatttgtaaattttcttaatttacaatatatcacacaattccattgtgtgataaattttgattgatcttggtcaggcaagcagatgaggttgactgttaaaactcttgatgctttatacacctagggatcatgttaaattgtcaagggttcagtctgaagagtgaggtgtgttagcccctgtgtaaatgaaatgctcactgycctgtggaaatttgggctgatgatgaaggtttcactttatttggcactgctgtcctcgtgcatgttctgtgccctctcccggtgctaagaaactgtcaccaatccatttccctaccaaagtggaatggaacaagataygcgtgcagcaacaggagtagaacctgccctgcctatggatgaagtcttttcacaaacacttctggccacgctcaacctactgtatccagtgctacctggcatttgaaacaacagttccaaattttccttttccttcaagtgatttttaattttttttccagtttgcttttctacatctccttaaagctgaaaagacaacttcttcattatcttaaataaattttcattaagggttgggggggaaggggatgtctcaacccaaactaatccatcggtcaaatagagaatattgtctctaatcataaaaaaatcctgatagttcagcatcaatagtgcagcatccatgctcctggagcaccataatgtaaagacagtccaagaaacaggagtggagtgagcatcagtcacagaccacaaagagcgcaagctttggagtcagaaaaccaggtttactttggtaagtaacttaacttctttcattcttccttttctcattgtccaatgggaataacaatatcaactctgcaagactgccacaagaattaaatggtataatttgcaaatcactagctcagtgctctgctacatactaactgctatggcagccccatagaaagtcaggtacagattaagcctgatgtactgcacaacaataataacaaggaataaggtgttgaaaatagctgcattatatcatatcccattattaacagttaatggtgctgaactaggagttatgcccttgagaaaaattgtatttggttagctggtgatactagtttatgatggtttattgtaagtataaaatgattgcaaaattttgtcccaaccaattttcttcttagaaaatctatctctaatagcaataaaatgtggttgctgttatgtttcatttttttttctgacacaaagctgggctttgaaggagcttttctatatactaagatgagctcaataaaaataaaatcctttggattaaggtaacatccctatgagacctttgcctctggtagaggcatttgcagtaatgaacaaaagaagaatggaagacttccattgttgctttaaattacatgtgtgacagatcacaaagaaatggcttttagttaaatgagcaatattttcttggttttctctcagctcttcaatagcagttaaaaggtccattggaagtatgaattttcctagcaaaataacactgcattataaatgttgccagtttctgatcactgactcattccttaaaccttgctggcttctgttttcactatgtgacagaactgcattcttaaaagtcaccaacaccttccatggcttgtctttagtctccatctccctctgcaatctttaaccctgctgatcagtacctgctaaaaagtcttctctgcaaaagataagtagctaccctatttatcttcctagcactctgagcacattatacaattttgctgatttataataatccccctgtttcctgaatgtacctatttcttgaggtttgtctcctctgtttttttgctctctttatattctttctcttggtaaactcatccacaccatagtttcaacacctaccacactgccaataaccctcaaattcgtatttccagtcctatcctttctcctgatctccagacctgattatcttctcagtggccagctggacaatcccaacagggtatccccctcagtatacaaacaaaatgcaggtatcacaccagatcatattcagttgtctcaactgagtatcatgccctggtgtctcgattttgggatctccctattgcctgcttcaactgtaacctcagagccataattagagttctgtctttgcttcaccaccctcatttctaattagtttacagattttttcttgcttgaatccatctgctccttccatcctcactgccctcatcaaggaacaggttctgatttcctcttccctgaacgaacacagtaacctcaatacaaaactctccaatttcaaccttgtttttccccaactgctatacacactggtaccagattaattttctaaaatttggcttcaatcagatcattcccacgattaacacacttcaatcattcttcactttctactaatataaagaaaagacgcatagcctggcattcaggaaccatcacagtattatgcccatctgtccactttttctttcttctctcttgatattcctctaccacataccctgaacaagttccatacaagttcttcagggtgaattcagtgcccatcaaatcttgagaacttcttcgctaaaatacaaacaaactgaaatggtcacagtgtaaccagcatggttactctgtattcataacattttgccccctattcctgttaagtattattcttcatcaccacctccaccacctcattctacccatctctcaacatccaggaacattgtccgtaaagctttttcataaagcttttaaaaaatgactctcttctacccccacttctatctatgtctctctcatcagcttatttatcgttatttatatgtgctatcttctgagatgtctataagggcctcaaatgcagaatccatgtctaagtcatcttttttgttttttaaagtactcaacataacatattatccatagtagacactcaatgaatactttattcataaacaaataaaaggttataaataatgacattcccttagacaatacttaggaagttcaggagggaacttcaaaatgtgcatggctgacaaaagggacctatgaattaattttggcattacatatattttataacaaattagtttaaaatttagatcttaatgattagaaatacacttttaaaagaataaattaaaaatgttacactttttgatgaaatagccaaagcatgtgtacgtaaataattctacttatttctttatgtcaataagctatctgtggcagattacatttttcaaagagggccacaaaaatatatccctactcacacacttttctgtgatgtaatctttccacccactcatctcaagaggtggagtctatttcttcatctgcttgtatctggctggggatgggtcggtgtgactgctttgtccaattctgggcataatacttaactggcctggtagcttttgctctttggctcttggaaaagagccatcatataagaagtatgtctatgaaatcatcatactgtgagaagcccaagccacactgacagtccctggagaagaaatgtcacatggaaatcgagagacggaaaggtgaaagaacaccgtggtaccaaacatctgagtgaagaagccatgttggaagtggatcctctatcatgagccactccagtttatgccatgtgaattggacacaaaccgcccagctgagcccttctgaaattcctgatttgtaaaattgtaagcaaaataaaagtgttgctttataccactaagtttggtgtagcttgttacttagaaatagctcgtggaaacactactcatcaccaatttgaacctgtacaactatgttcacacaaaaacaaaaatggtatgactacaaaacagacagctaggaacaacaaactgctatgtttgtgatttaaatgttctaaacaaaaccaaatactggccaatttactaattcctttagtcctttccttagcaaaaaattaatcaatataaaaatggattaaatatatttaatattttccaagtcaagcctccaccacaaacgcataagactaagttataaaataggctgaaaactaccaaagaaacataagttaaaaaaaaactaggacaagtttgcaaaaatgtattctggcaatgtccattattagtttacataaattatgatgtattctaatactgaaattctaygtagccatgaaaaatgatgatgtagctatactgacaataaagatatatatagtatattaaatgtaaggagccaattacaaaactgtgaatagtgaaatcttatttgggactgcttttaaaaggatatgtatttgtcctttctctctgtctctctctgtatgtatgtatgtatatacacatacatataacatgtgtacatatgtatacacacacactttttttctatcaaaaagaggtctgaaaagatgtacataaacatttcattatctttagggggtggaattacaggtcatctctgttttcttcttaagactttaaggcagtgattctcaaagtgttgtcctgcaaccaacaaaatcaacatcatctgacaacttgctagaaatgcaaatttgtgggtgtcatcctgggcctactgatcagaaacgctgggtgtggaactccgcattctgtggttcaaacaggcctccaaggcaacactgatgtatgctaaagcttgcaaacaatggcttcaccactgaattttgtaatttttaaaaaggaaatatggtattttctcagttaaaaaagtgagtgtgtttcctttataaagatttttaatgggaattttttaaaaggagcaaagagatgattagagtagtatgcacatgttattttttccatctattttccatttttttattctattctccatatgttttagctgctattagatatttttaaactctttatctctctgtacctattcccagtttgtagactgtctttttacttctgtctaatctgcctgtttaaactgtccattgagttttaatttcaaactgctatatttttcatttctaaaartcagcttttttctttttcaaatttactttattttcatagttacctctttttactgtagggtgtataccttctccttaataattgtaaaggcactttttaattagtatctttgagatcatcctcaaaccccaagttttctgtatcctaattgttatgcttgtcttatctgctgcccctgttttatgatatatgttttcatcattttgtttgcagtgttttattttaaactgctcttcasagaattgttttatctgtagatgtctcaagagaggctgtggaagtatttcaacatagcagatttgtacttatttttgccaggtaacaggagtttctctggtctagaccagtttgtgctctaatttctcggtttagaacttcaaccacaatgcatgtagtgtaaattcacagtatatatcttttctcatgggaggcttttgtattattgtcattcaaagtcctgagacgaaaaaactagttttgttgtacataggataaagtttccttgtatcttggggaaagtttgctgcttagcctttcactgaggggtcaggactttcagagtccaggccaggcttctatcgtggcacccactcaccccccacctcagacaatgccacaattcctgtcctatgacgctgggacctgtatccagtctaagaatctcccaaactgtgacagcttcacattttgagtgcatcgttcttagcttcatgtcttctttttgtttcctccagatgaactttcttttccctcaggttcatctttgtattttgttcagcatttttaagagcttatggaaggaggaaatttcactttagttcagtctgccatactgatggaacctccacatttcctttaatgttgttatcttgctcttgcaattaatttttttaaaaacctcggttgttggaagttccagctagagcaatcaggcaagagaaagagataaagggcatccgaattgaaaaagggaaagtcagactatctctatttgccgatgatatgatcatatacctagaaaatcctaaagactcctccaaaagactcctacatttgataaataaattcgggaaagtctcaggttacaaaatcaatatacacaaattggtatcactgttatataccaacagtgacctagctgagaatcaaatgaagaactcaatcacttttataattgctgtaaaaacaaaccaataaacgaattttaaaaatctaggaatatactttaccaagaaggtgaaagatctctacaaggagaactataaaacactgctaaaaaaaaaatagataacacaaacaaatggaaatacatttcatgctcatggattggaagaatcaatatggtgaaagtgaccatactgcccaaagcaatctacagattgaatgcaatccacatcaaaataccaacatcatttttcacagaattagaaaaaacagtccccaaattaatatggaaccaaaaaagagcccaaatagccataacaatcctaaacaaaaagaataaatctggaggcatcacattacccaacttcaaattatactacaaggctatagtaaccttgtagtaggtacttgtataaaagtagatacatagaccaatggatcagaatagagaacccagaaataaagccaaatgcacccatcaaactggtccttgacaaagcatagaaaaacataaattggggaaaggacaccctatgtcataagtggtgctaagaaaactgtacagtcacctgtagaagaatgaaactggatccctatctcttaccatacacaaaaataaactcaagatggactaaagacttagtctaagacctacaacaatwaaaattctagaagaaaacccaggaaaaactctctggacattggcctaggcaaagaatttatgactaagacacctaaaggagataaaacaaacataaataaatgaaacctaattaaactaaacagcttctgcacagcaaaagaaataatcattagactaaacagacaaaccacagaataagaaaatatttgcaaactacacatctgataaaggactaatatccataatctacaagaaactcaaacaaattagcaagaaaaaaataaaaaatcctatccaaaaagtgggcaaaggacatggatagacatatctcaaaaaaagataaacaaatggctgacaaacatgaaaaaatgcacatcactaatcatcagggaaatgaaaattaaaaccacaatgagatatcaccttaccccagccaagatggccattattaaaaagtcaaaaaacaataaatgttggcatagatgtggtaaaagagaatgcttatcaactgatagtgggaatgtaaattagtgcaacctctgtggaaagcagtatgaagatttctcaaagaaattaaaagtagatttaccattcaatccagcagccccattactgggtatctattcgaaggaaaagaagtcattatatcaaaaagacatctgcatacaaatgtttaccacaacacaattcacaattgcaaagaaatggaaccaacctaaatgctcattcaacactgagtggataaagaaaatgcggtgtgtgtaaacatacacactccccccacaacacacacaccatggaatactactcagccataaaaaggaacaaaataatatcttttgcagcaacttggatgaagctgaaggtcattatgtgaagtgaagtaactctgtatctcaggaatggaaaaccaaataccatacgttctcattcataagtgagagctaagctatgggtatgcaaaggcatatagagtggtataatggatgctggagactcaggagggggaataaatgggaggagggtgatggataaaaaactgcatgttaggtacaatatatactacgcgggtgacaggtacactaaaatctcagacttcacaactacataattcattcatgtaatcaaaagccacttgtacccctaaagctattgaaataaaaaaaaaaaactttgcttggtaaaaatgggctctgctaaatataatatctcagattcaaatctacacattgttaaccataacagttgcatttgatttcactgaaaataatcttttactaaagaaaataagtttcaaacttcgccgattatttacaatttgttatttatttatttttggtatagattatagctrtggggaaaaatagctctttctaggaggaattactattcagagcagtctgaaccagtgtgaaaactgctagaagcaggaaatcaaaatattgtttattctcatgaaaggcaggagattgtattagatactgctaggcccaatgtgactgctaactagaacactagtaatcactctattagctgcaaaaaatcttcaactgttcagcaatgtggtacagaggaaccagcccagtttaagaagagggctaagtgcagtgtttgtgaaaatgcagcccaagccatctgcacatgaatctcccagggtgctcctttgaatcttcattttaaacaattcttcctggtgatgcatctccatattcaagtttgagatcaactggttaagtgcataaaagcaagcattttggtaacaaaatacaaatcatataacaaagaactgaagttccgtttgagacaaagaatgaaaatcaagtacatcttacatgagttacatgatatatactaaattgtctacttcttaagaagggcagaggttttgtgtactctaatgctgagtgatctcccagctctaagagaacaaccatataggaaaatcgcatctgtctcaaccactctggtctgagacactatcatcttataccaggactatttcattagccccctaaatggtttcaaatgtcacaatggaaaagccttctatgtcctccacatttaaaatagtgccatctagtctttatagcacttttctccaggtgacacattacacaatatagacttattcatttgttctctatctgtatttactcactaggctatgaaactatgggaacaggactttgctttgttaattgctgtatcctgagtgcctagaggactgtcttccacctgtaaaggctcaacaaacacttcctgaataaataagtgaaagtgcttaaggaaggcctctcctccttctggattattagagaggatgaagctttcctagagggaacaggaaaaaaatccatagacaccagaaaataagatgtgttctgagtacagggcaaaccaaaccagtgtcatgagtttgatgtagggaagaacctcacacaaagagaaagaaagaatttcaaagcccctggaactcttgcactgaaatcagttttgttttgttgttgttgttgttaataaaaggtcaagctagtctttctggggtacttgtggtagcaataatgcaagggaggcwatagagaccctcgcaagtgggaggccatgtgttggtgatggatgcttcccttcttggggaacagaggggaccttcatcttagaggttctatgtttcccacctggaatgagtatcccaaatacaagagattgcagatactaccatttctgatgacttggaagaatgataaagtcgtaaaaaataaagcaatcttcctgtgaaatagacttgtgaaactctgggatacataaggattaagtctttttatttctttttccaattcaagtttttacctttgaacaaagaaaaaaaaataacatacaagtgaatagttggctaaaaaagaatagactagaatttattgttctgggtgatgacttatgatcttagaacaattggatcctgacagggagagagcacaatcttaaagagatgaggaagaaagtgtttggcatctgtgcccaccagatgaagatgttgtaaacctaaatgaaatcagatacaaaaaaagaacaatayacatgatacagaaaaagaactctaatagagtccagtaagtctcaggggaaaattaaggaaaagaaaaagtaatatttaggtccttaattgcctttgagacacagtctaagttctgacacaaaggagtaaatgtgatttcttggcaattattaaggctttctgagaaggtactcaggtctgaagatgcaattgactgaggcatagtgaaacagagagagcgagagaaagaggaggagagagagagagatagagcgaatttggtggttcctcaaaaagttaaacatagaatttatatatgatcgagcaatttcactcctaggtatatatcaagaattgaaaacagactcaaacaaatacttgaacctgcatgttcatagtagcactgtttacaatagttaaaagtgactggatgggtggataactgaaatgtgatatatatctatctatatctatatatgcaaaagattattcatctataaaaaaaatgaaatactgataaatgaacatggataaaccttgaaagcgtcgtgttaagtgaaagagctggacacaaaaggtcatatattgtatgattccattgatatgaaatatccataatagggaaatccacagagatagaatgtacattggtcattgccagggggtgtgaggatagggaaatggggagtaatttgttaacagataagaggtttcctttggggtaatgaaaatattttggaagtagacatagtggttgtaccgcatcataaaaatgtttgatgacacagaattgttcactttttattgtttgtctgtttattgagacagggtcttgctctgttgcccaggctgtagtacagtggcacaattgtggctcactgcagtctcaaccttctgggttcaagctgtccccccgccttagcctcccaagtggctgggatcatatgtgaatgccaccacccccagctaatttttaaattttttgtagagacagggtcttgccatgtttcccaggctagtctcggactcctgggctcaagcaatcctccyacctcagcctcccaaagtgctgggattacaggcatgtaatccactgtgcccagccagaaatgttcacttaaagtggataattttatgttatttgaatttcccctcaataatgagaataataaagatagtctcaaaggttaaaaaaattaattgaatttttaaaaagatagaagcgggagggcagggaaggggagagtagaggagggagcggcagtccctgatagaaaaggatatgcttctagaacagcccaaacctcagggcagcagcataatgtagggtgcttcctgagactaatagtgtagagagacaccaaagcaacagaattctgaaaggaagactcagacagcctagtccgacagaccattaagaatgatagtctccaattaaggaggcagagcacagagacaaaagatgaatgacagattccacagaggacatatgctgtgggaactgcacaggttaataaactgaagtctttgtctccaaaagctaacactctaatacagctgtgactttcagaggacggccttttgccatgatagaggtaaatgtacatgtcaggatcattcagaagaaagagaaaccacttttcaaaagtggaaacagtaaaagctccataaacatttgcaccatctcttactgagtgattgcagagtagggtgaatgaaaagagggaaaagcacatgaagacacagggcatgtcacatgcatgaaggggttccataagcagtaaggctggcaaggaggactctgtccagactggtacctgaatgccaggctaacaaatctggactgtatttatcagctaatagagaagcatggaggttwctaagtagtgagtgacatgagatttgctttgggaaaattattctggcaggtatgtgtaagaagaaaaatggactaccagcagggagagcacttagaaatagactcagtattccaggtaagagggaataagtatctgcactgagacattcctttttctcttttttttttttttttttttttgagacagagtcttgctctgttgcccaggctggaatgtaatggtacgatctcggcccaccgcaatctcggcctcccaggttcaagcgattctcctgcctcagcctcctgagtaggtgggattacaggcacctgccaccatgcccggctgatttttgtatttttagtagagacgggtttcaccatgttggccaggctggtctcaaactcctgacctcaggtaatccgcaaacctcagcctcccagaatgctaggattataggcgtgagccactgcacccaggcttgcattgagacatttctgtggtatgagagtaaagggacagataaaatgggtatcggaaagctcactggaagtagaagacaaagagaataagaatttgattggggggacggatgggtaattatgtcattagttaaaaaaagtagcacagaygagttccatttgacatatattgtgtttcaaatgggcaggaagatccaggtggagggctcaataaacagcaataaagcctgaggagagataagaagtgcaggagacatccttaaaggtatgagggtcgaaattcgattcaagtttgttatgcagatggtctgtgagcacttggggaaatgaagagaaatcaaccagaagcaaacctgagtttgctgccaactagttatgccaaattaacctcaattcctttgtgatgaggtacctagactcacaatcagggaagcgttttgacatggcatatcttgatttcagctaaacatgtgacagtatcwcatgatatccttatgactaaaatggaagcatgctgggtacaaaaacagatatagatggattcagagttaattgactaatcatagctgaaacacattgattaccacagcattgctgacctgaacacaaatacaggagaacctaaaaaatattaactttatactcaaatgtttatacccttaaaaagaatggctaatttacctcactgagtagttgaaggaatctccaatagaatcacaacaaattattttgttggtttacagtgttattcatggtttggaattttaactaacagtgaccacagaaagaattcttggcttgtcatggtggcacacgcctgttatcccagcactttgggaggctgaggtgggaggattacttgagccaggagtttgagaccagcctgcacaacatagtgagatcctgtctctacaaaaaattagctggctgtggtggtgcgggctgtagtcccagttatttgggaggctgatttgggaagatcacttaagcccagaagttcaaggcagcagttagctgtgatcatgccactgcaccccagccttggcaacagagtgagaccctatctctaagaaataaaaataaaaaaataattcttaagacattatctcaaaagaataagctagaattacttgtgcacattatttggaaggaaatggctaaagatggcatgttgtctttgtgtaatgtatacatgtaagattccctatttaatagtttgagagacttaaatattttattgctaaaatactatggttaaatatacatgtcactaaatgctaatatctgtcaaaacattcattataaaaaattgtcttttgacattttaaggtatcaccaatttccatttgaagaatttatcattaaaatttcatggggaggcagcagggcctgggaattaaatatggtacaagatgccacagactgagtttctacccaaactctccaccatagtcactgactatgtactagcagaaagagtctatatggaattgtaaaatacactgaaattacagtgtttgaaaagtgcctaagataatgtgttctctgaaaagagaaatcaatcatgtataactgttacctactggaataaataggcttagtcactactcagaccttaatgttatctcagtatacaatgtaatttaatattatcccttaataataatacttaagtagttgcccgtgaatatatgagccttattatttcattgtaattcaaccagtagcatccagaattgtaaaaggacaggtggatggatgaatggagcgatgagagaataccctcccctctacctaccactgccttcctctttcatcctttctagaattcagaagtgatggctggagctcagcagcagccatagaaactgacatataaactttagaagcctttaggactaaaagttcatgctccaaggatggcagggctggaagacaggaggagctctgggcctcttaagagtgggagaaagccaaatggatttcgttacatgcagttaaatttagccccaaccaatacacactatgtgtccagtattcaccttatctttccaccacatcatttgagtcatcacttgcaagtctttcaaaagttttcataaatattaaagtacagaaagacatcaacacatgccttgatagtctatggccttgtgtccatctggatgctttaagaaatattttgaattcttattttttaagtaaatgctaacgacatggtaatcgtttttatagatttccaatgaagggtgrggtgctttgacagctgtcagcggagtgtcaaacagactgtggcagtgaaagatgaggagatttaaaagcctttattcttagtggccttaatttcatctgatactaagtagctaaaacttggcatccactgaggaaaagtgttattcttccccataactcctcyacctattctttcttccctgcctcagatttcccaagcttctctcagttgtgttcagagttggccccagtttaagatatgatgctgccctakactatgtgacaacctcaactgaatctctaagtacctatcctttctaatatctcatttaatggtacccagaatattaagtcatattaggacaaagagcctatgatgcctaggaagttactgggcttgctcggtgtggttgaaggaattctgagatggtccctgtgatttccacccactgaatatagctcccctctccttgagtacaggtagaacctgtgacttgattctaaccaatagaagacagaaatggtgaaggaggccaggagcagtggctcgcgccttaattccagcactttgggaggccgaggcgggcggatcatctgaggtcaggagttcgagaccagcctggtcaacatggagaaacctcatctctactaaaaatacaaaaattagctgggcatggtggtgcgcacctgtaatcccagctggggaggctgaggcaggagaatcacttgaacccaggaggcgaaggttgcagtgagctgagattgcaccactgcacttcagtctgggtgactgagactctacctcaaaaaaaaaaaaaaaataaggtgaaagaatatccctctcatgattatattgttacattacgtgagtctgtcttagcagtctgagtgtgagggccttgaaraagaaaaaaaccatgttataagcagcctacagaaagcatctcatggtaaagacctaaaggcagtctctaagtccccagactgtaaaaagccagggccctctcttatacagtccatagccccaaagaaatgaattcttccaataacctaaataagcttggaaatggattcttccctggtcaagcctctggataacaacacagcccagttgacactttgattatagccttgtgagacacggagcagaggacccaactaagtcagccatgattcctgacccacagaattgtgagatagtaaatacggcttgtttcaagccactacgtttgtggtaatttgtgaggcatcacaaaaaaactaacaccccgtaagcctcccttgctttcacctgatctgggacccattgccccagtgttggttttttcacttaattgaagccattctgaatctcaggagctctagtccacagcactgaagtttcagctttggtcatttttctttcaatggtgccatttctttcaatggcactacttgccaccatcccaaacccgcatatactgccttgtagattttaccttgctttggtgaatctcatttttccaaatattcaggccgtaactactgcaatccccgtagtcctcacaaagattggcacaaatactgtttgaccagtagtcagatattacccatagccaggtctcctggtcaataacctcctgccagcctagattccccaaaatatttccccaacactctggcatctccagtgctttgcatcactacctctcaccttatcagaagctctccagtgttcatgggtttacctgaactctaacttgaggttagcatctgttggatattggactttcttacctggtcatttccttcaattttgcctttcttatacatttcaaaaccaaaacagaactccactcattaattctaagaaataaaagcaaattcagtattaaatgcttattaatgtggccatgatactagtattcctatgtactgatatagtatgtataatttaattttgtatgtgttcaattttggggaaactggaatgcactataacatcaaatgaatatttgcagtatatttatatccattttatagattttgcaacagctttttcaaaaacagatataaattatttttaacagacctaaattattatgaagggttacagttaaggaatctgttttgttttatgacatgttgtacacatattttacacatatcacacttctgttatacatgaggcgatcttgaataggccattctgaaatgaccatttattacaaaattcatacagaaaaaatattattcaccctaacctatcatagtgtagtttttagaaatgaactgcagtgaaaatggaatatttactatatcatatataatgcagtatatattatagcatttactgcccctaatagcaaattactatcacttttagcaataatagctagcatctaccaactatttagtgcttactaagtgtcaagcattattttaaatgctttacatatattatctcattaaatcttgggaaacatgacaaaagaattttttttttaatttttgtttttttagatggagtttcttgttgcccaggctggagtacaatgacgcaatctcggctcactacaatctctgcctcccaggttcgagcgattctcctgcctcagcctcctgagtagctgggattataggtgtgcaccaccaagcccagctaatttttttatattttattggtagagacagggtttcgccatgttggccaggctggtctcaaactcctgacctcaggtgatccgcctgccttggcctcccaaaatgctggaaytacaggtgtgagccaccgtgcccagacgacaaaagaattattaatcccattttaaagatgagaaactagattaaagacactagataaatttttaaagatcacaaaattgcaaaccaggatttaaactcaggctgctctaacaccagatttcctatcctattacggtatattagctctaatttgatttctatatgtgtatagtcaaataaattgtgttgctgaatggtttccttttttttatttttattttttttcttgagacagtgtctcactctgtcatctagactggagtgcagtgacatgctcactgcagcctcgacctcccaggctcaagcaatccttctacctcagcctccctagctggtaggactacaggtgcatgcctctatcccagctaatttttttttttgtatgttttgtagagacggattttcaccgtgttgcccaggctgatctcgaactcctggactcaagtgatccacctgcttaggcctcccaaagtgctgggattataagtgtgggccactacacttggcccctgaatggtttctaaaatcttgttgaacggtcgcacttgtgacaaatttggaatacaaatttggattttattttggctcatatattatttggctttaatgtatatacatatacatgttcacagaaatttttgaataagtggttacttatgaacaaaaagaaaaactaaatataaaatagacaatactttcagggcaatggctaacattaaccatgaatattaatattaagatcttagtgcctgsaattacactgaatttgtaaaccaaatcatggataactgacatcttaacaatatggagctttgctatccaagaacacggtatattttccaatttatttaggtctttaatttctttcaacaatgttttgtagttctcagaatgtattgcacatattttgttaaattcatcccttagtttttcaaggttttaatgctattataaataatatgatttaacattttcaattttcaattgtttattgctagtatagagaaacaaattaatttttttgtatattgacctgtactcttcaactttactaaacttacatattagttctagtattttttaaataaattccttaatattttctacatgtacaatcatgtttttaaaacttttacttttcacttcctaatctgtattctctctcatttctttttcttgttgtactgtacrgtctaaaaccttcaatacaacactgaattaaagtaatgggatcagatagctttacctggttttctgtttcagaaagaaatcatttatgatgctttatagccatgaagtcctttataatttatgaaagcatcatgattaactataatgttgctgtaggtttttataggtacctttttcagaatgcggaagttcccttatatgcccagttttctcagaatttttattatgaatagatattgagttttttcaaatgctttttctgcatcagttgaaattatcttatggttttgctttctcattatgttaatataagttacactgacttttgaaagttaaacacccttgcattccagagataatccccatttggtaacaacatattatccttttttttaatgtattgttggaatcaatctgctaatattttcataaggatctttgtgtctaccttcactggagtattggtatgtagtttttttttcttgtattgcttttgtttagttcagatgtcaagccaattcttggcttatcaaatgagttagggagttctccacaatttctactttatttccctacatactcatctctcagagataattccttttactcagtttttcgaaacctcagtttgtagctcatttatattttaaaatagatraatatacaaaatcagtttgccttgtagaaataatgttgtagaagtatgagctatgaaaagcaatggggaacaaagaaattcacagtatcattggaagcagaatactgtgttcagaaaacaaaacattgatgtttgcaaataggtctctgtgtgatgaagaatactgcttatataatgactaggtttcaaaatmaaatgtgcaacatattcaaaatcttacggaattgtaatcatgtagaaaataatagttttctaattgctcttaagagaataattttttttttttttgagatggagtcttgctctatcgcccaggctggagtgcagtggtgtgatctgggctcactgcaagctccacctcccgggttcatgccattcttctgcctcagcctcccgagtagctgggactacaggagcctgccaccacacccggctaattttttttgtatttttagtagagacagggtttcaccgtgttagccaggatggtcttgatctcctgacctcatgatccacccgccttggcctcccaaagtgctggcaagaggggatttttaaggctttatgagttacttaccaaattcctaatattctcaattgattttataatttctaaggaaaattgtcaacataactatatttgttaaccatgcacagtggggaaaaatcgccaatttaatgtgtgaataacaacctccagattgctgaataagaaaaattgagcctaagttactttaggttgaataatttcccttaggaatatcactccttcctaacatttccaaatttctcttacaatactgtcacacctattaaacaatgcaactttccaatgcatgatgtaactataagctattctgagcaatatttgtagttctcttgtcttaattgctgagactctatcgtaaccattttgttatgtggtgaattctgcatcaaggagaagcacttctgtggcagtgctgcctcaaactgccctaccagaagtcaggtgacaatatggaacattagactgcatggtaagctattcattagactgttaactttgtctgacccagtttgtcaagtgtttgtgttctaaatgtcaattcctactcacctggttttgctagactaataagaaattaccttttccaaagaaaagagaagaaagtaagactatcaggaaaagtaaactcagaagtctcttgggggaagaattaagtactggtgagaatcatcttaattacccagttgggaggttagtgagactctttcttcatcctgtttgtctaatactacccctcattttaaacttggctacttaccctcatcccacagcatatgccaaatctaagaaaactttccagcaaagcattttcttagaccagatgaaatcacctctgtttgaaaaaagtcaattcatattatataactgaatgataaaaagttagtcatcatttttatatatgatcagctcattattattatttccaccagaaataatcatagaaaattaaaaggagattaaactggaagcttactatcaatgtcataagagatttagtgatggaggaatttacagctactaagaagagagtttaaaatgatctataaatgtctttcattcatgatgatccattaccaaagataatcaagagttggctaaaatacctccaaaacctcatcaaacagttatattagaggaaagagactgatagtttctagtatactagaatgttttaggtgaacaaagagtaaacacatgattatgtctcagaccaaaaaacaatgtgcaactttaaatgtactgcatagcactttccttatttactatgaaacatatctgcttgctgtgaactgatttgtccaacccctaagaggtagttccccaggtaatgaattttgccaacataataaaagattatatgaaacgtcttgaaattaatccaaaggatgaagcaggtcaaaatattycatctcataagttttaacttttatgtcagtgcagtcatttttttaaataatttcaacttttattttagattcaggtggtacatataaatgcttcttacatgggtgtattgcatgatgctgaggtttgggatatgaatgacctgtcacccagataacactatctgggtgcatagtacccaaaagttagtttttcaacccttccttcccctccctttcccccttctattagtccccagtgtctattcttgccatctttatgtcacttataagtgagaacaggcgatatttggttttctgttcctgtattaatttgcttagaataatggcctccagctgcatccatgttgctgcaaaggacatgatttcattctttttatggctgcgtagtattccatggtgtatatgtactacattttctttatcctatgcatcattgatgggcacctaggttgattccttctctttgctattgtgaatagcactgtgatgaatatacaagtgcacatgtctttttggtagaatgatttattttcttctagatatatacccagtaataggattactgggtcaaatggtagtactgtattttagagatggggtcttactctgtcatttaagctggagtgcagtggtgcaatcctggctcactgcagctttgaacccctgggctcaagggatccttctgcctcagcctcccaagtagctgggactatgagcatgtgccaccatgcccagctaatttccttattatgttgtagagatgaggtctagccatcttgccaaggctggtcttgaactccagggccccagcaatccttccaccttggtttcccaaagtgctgggattacaggcatgagccactatgtccagcagtagttctaagttctttgagaaatatccaaactgctttccacagyagctgaactcatttacattaccaccaacagtgtataagcattgcctttactctgcagcctcaccagcatctgttgtttgacttcacaataataaccattttgactggtgtgagatgatatctcactgtggttttgatgtgcatttctctgatgactggtgatgctgagcattttttcatgcttgttggctacttgtatgtcttctttcaagaagtgtccatgtcttttgcccactttttaatggggttgtttttgcttgttgatttccttaagttccttatagattctgaatattagatctttgtcaggtgcataggttgtgaatattttctcttattctgtaggttgcctgcttactctattgatagtttcttttgctgtgcagatgctccttagtttaattaggtcccactcgtcaatttttgtttttgctgtaatttttttgaggacttggtcataaattctttcccaaggttgatacccagaatgatgtttccttggctttcttctaggatttttacagtttgaggtgttacacttaaatttttttttttaatttttttttttttattatactctaagttttagggtacatgtgcacattgtgcaggttagttacgtatgtatacatgtgccatgctggtgcgctgcacccactaacgagtcatctagcattaggtatatctcccaatgctatccctcccccctcccccgaccccaccacagtccccagagtgtgatattccccttcctgtgtccatgtgatctcattgttcaattcccacctatgagtgagaatatgcggtgtttggttttttgttcttgcgatagtttactgagaatgatggtttccaatttcatccatgtccctacaaaggacatgaactcatcattttttatggctgcatagtattccatggtgtatatgtgccacattttcttaatccagtctatcattgttggacatttgggttggttccaagtctttgctattgtgaatagtgccgcaataaacatacgtgtgcatgtgtctttatagcagcatgatttatagtcctttgggtatatacccagtaatgggatggctgggtcaaatggtatttctagttctagatccctgaggaatcgccacactgacttccacaatggttgaactagtttacagtcccaccaacagtgtaaaagtgttcctatttctccacatcctctccagcacctgttgtttcctgactttttaatgattgccattctaactggtgtgagatgatatctcatagtggttttgatttgcatttctctgatggccagtgatgatgagcatttcttcatgtgttttttggctgcataaatgtcttcttttgagaagtgtctgttcatgtccttcgcccactttttgatggggttgtttgtttttttcttgtaaatttgtttgagttcattgtagattctggatattagccctttgtcagatgagtaggttgcgaaaattttctcccatgttgtaggttgcctgttcactctgatggtagtttcttttgctgtgcagaagctctttagtttaattagatcccatttgtcaattttggcttttgttgccattgcttttggtgttttggacatgaagtccttgcccacgcctatgtcctgaatggtaatgcctaggttttcttctagggtttttatggttttaggtctaacgtttaaatctttaatccatcttgaattgatttttgtataaggtgtaaggaagggatccagtttcagctttctacatatggctagccagttttcccagcaccatttattaaatagggaatcctttccccattgcttgtttttctcaggtttgtcaaagatcagatagttgtagatatgcgtcattatttctgagggctctgttctgttccattgatctatatctctgttttggtaccagtaccatgctgttttggttactgtagccttgtagtatagtttgaagtcaggtagtgtgatgcctccagctttgttcttttggcttaggattgacttggcaatgcgggctcttttttggttccatatgaactttaaagtagttttttccaattctgtgaagaaagtcattggtagcttgatggggatggcattgaatctgtaaattaccttgggcagtatggccattttcacgatattgattcttcctacccatgagcatggaatgttcttccatttgtttgtgtcctcttttatttccttgagcagtggtttgtagttctccttgaagaggtccttcacatcccttgtaagttggattcctaggtattttattctctttgaagcaattgtgaatgggagttcactcatgatttggctctctgtttgtctgttgttggtgtataagaatgcttgtgatttttgtacattgattttgtatcctgagactttgctgaagttgcttatcagcttaaggagattttgggctgagacgatggggttttctagataaacaatcatgttgtctgcaaacagggacaatttgacttcttcttttcctaattgaataccctttatttccttctcctgcctgattgccctggccagaacttccaacactatgttgaataggagcggtgagagagggcatccctgtcttgtgccggttttcaaagggaatgcttccagtttttgcccattcagtatgatattggctgtgggtttgtcatagatagctcttattattttgaaatacgtcccatcaatacctaatttattgagagtttttagcatgaagggttgttgaattttgtcaaaggctttttctgcatctattgagataatcatgtggtttttgtctttggctctgtttatatgctggattacatttattgatttgcgtatattgaaccagccttgcatcccagggatgaagcccacttgatcatggtggataagctttttgatgtgctgctggattcggtttgccagtattttattgaggatttttgcatcaatgttcatcaaggatattggtctaaaattctctttttttggttgtgtctctgcccggctttggtatcagaatgatgctggcctcataaaatgagttagggaggattccctctttttctattgattggaatagtttcagaaggaatggtaccagttcctccttgtacctctggtagaattcggctgtgaatccatctggtcctggactctttttggttggtaaactattgattattgccacaatttcagagcctgttattggtctattcagagattcaacttcttcctggtttagtcttgggagagtgtatgtgtcgaggaatgtatccatttcttctggattttctagtttatttgcgtagaggtgtttgtagtattctctgatggtagtttgtatttctgtgggatcggtggtgatatcccctttatcattttttattgtgtctatttgattcttctctctttttttctttattagtcttgctagcggtctatcaattttgttgatcctttcaaaaaaccagctcctggattcattgattttttgaagggttttttgtgtctctatttccttcagttctgctctgattttagttatttcttgccttctgctagcttttgaatgtgtttgctcttgcttttctagttcttttaattgtgatgttagggtgtcaattttggatctttcctgctttctcttgtaggcatttagtgctataaatttccctctacacactgctttgaatgcgtcccagagattctggtatgtggtgtctttgttctcgttggtttcaaagaacatctttatttctgccttcatttcgttatgtacccagtagtcattcaggagcaggttgttcagtttccatgtagttgagcggctttgagtgagattcttaatcctgagttctagtttgattgcactgtggtctgagagatagtttgttataatttctgttcttttacatttgctgaggagagctttacttccaactatgtggtcaattttggaataggtgtggtgtggtgctgaaaaaaatgtatattttgttgatttggggtggagagttctgtagatgtctattaggtctgcttggtgcagagctgagttcaattcctgggtatccttgttgactttctgtctcgttgatctgtctaatgttgacagtggggtgttaaagtctcccattattaatgtgtgggagtctaagtctctttgtaggtcactcaggacttgctttatgaatctgggtgctcctgtattgggtgcatatatatttaggatagttagctcttcttgttgaattgatccctttaccattatgtaatggccttctttgtctcttttgatctttgttggtttaaagtctgttttatcagagactaggattgcaacccctgcctttttttgttttccattggcttggtagatcttcctccatccttttattttgagcctatgtgtgtctctgcacgtgagatgggtttcctgaatacaacacactgatgggtcttgactctttatccaacttgccagtctgtgtcttttaattgcagaatttagtccatttatatttaaagttaatattgttatgtgtgaatttgatcctgtcattatgatgttagctggtgattttgctcattagttgatgcagtttcttcctagtctcgatggtctttacattttggcatgattttgcagcggctggtaccggttgttcctttccatgtttagcgcttccttcaggagctcttttagggcaggcctggtggtgacaaaatctctcagcatttgcttgtctgtaaagtattttatttctccttcacttatgaagcttagtttggctggatatgaaattctgggttgaaaattcttttctttaagaatgttgaatattggcccccactctcttctggcttgtagggtttctgccgagagatccgctgttagtctgatgggctttcctttgagggtaacccgacctttctctctggctgcccttaacattttttccttcatttcaactttggtgaatctgacaattatgtgtcttggagttgctcttctcgaggagtatctttgtggcgttctctgtatttcctgaatctgaacgttggcctgccttgctagattggggaagttctcctggataatatcctgcagagtgttttccaacttggttccattctccacatcactttcaggtacaccaatcagacgtagatttggtcttttcacatagtcccatatttcttggaggctttgctcatttctttttattcttttttctctaaacttcccttctcgcttcatttcattcatttcatcttccattgctgataccctttcttccagttgatcgcatcggctcctgaggcttctgcattcttcacgtagttctcgagccttggttttcagctccatcagctcctttaagcacttctctgtattggttatcctagttatacattcttctaaatttttttcaaagttttcaacttctttgcctttggtttgaatgtcctcccgtagctcagagtattttgatcgtctgaagccttcttctctcagctcgtcaaaatcattctccatccagctttgttctgttgctggtgaggaactgcgttcctttggaggaggagaggcgctctgcgttttagagtttccagtttttctgttccgttttttccccatctttgtggttttatctacttttggtctttgatgatggtgatgaacagatgggttttcggtgtagatgtcctttctggttgttagttttccttctaagagacaggaccctcagctgcaggtctgttggaataccctgctgtgtgaggtgtcagtgtgcccctgctggggggtgcctcccagttaggctgcttgggggtcaggggtcagggacccacttgaggaggcagtctgcccgttctcagatctccagctgcgtgctgggagaaccactgctctcttcaaagctgtcagacagggacacttaagtctgcagaggttactgctgtctttttgtttgtctgtgccctgcccccagaggtggagcctacagaggcaggcaggcctccttgagctgtggtgggctccacccagttcgagcttcccggctgctttgtttacctaagcaagcctgggcaatggcgggcgcccctcccccagcttcgttgccgccttgcagtttgatctcagactgctgtgctagcaatcagcgagattccgtgggcgtaggaccctccgagccaggtgtgggatatagtctcgtggtgcgccgtttcttaagccggtctgaaaagcgcaatattcgggtgggagtgacccgattttccaggtgcgtctgtcacccctttctttgactcggaaaggggactccctgaccccttgcgcttcccaggtgaggcaatgcctcgccctgcttcggttcgcgcacggtgcgcacacacactggcctgcgcacactgtctggcactccctagtgagatgaacccggtacctcagatggaaatgcagaaatcacccgtcttctgcgtcactcacgctgggagctgtagaccggagctgttcctattcggccatcttcgtatgactcttgtagataacctacacttaaatttttaatccatcttgagttgattttgtatatggtgaaaggtaagggttcagtttctttcttttgcatatgtctagccagttaccccagcaccatttatttaatagggagtcctttccccattgcttatttttgttggctttgtcaaagatcagatggctgtaggtatacagtttgatttctgggttctctattctgttccattggtctacatgtctgtttttgtactagtaccatgctcttttggttactgtggacttacattactagtttgaagtcaggtaatgtgatgcgtctgactttgttcttacagcttgggattgttttggctattcgggytctttttctgtttccatacgaattttaaaatagatttttctgattctgtgaaaaatgatattggtagtttgataggaataatactgaatctgtaaattgctttgggcagtacggtattttcaggatattaattcttccaatcaatgagcataggatgtttttccatttgtttgtgtcatctctcatttcttttagcagtgttttatagttctccttgtagagatcttctatcgccttggttgggtgtatttttaggtgttttttttttttttagtttttgtttgtttttgttttggtgtgtggctattgtaaatgggattgtgttcttgcttgggccctcagcttgaatattactggtgcacagaaatgttactgatttttggacattgattttgtactctgaaactttatggaagtcatttatcagttccaggaggctttagggttttctaggtatacaatcatatcatcagtgaaaagagaagttcgacttcttcttttcctattttggatgacttttatttctttcttttgcctgatggctctggctaggaattccagtacmatgttgaacaggagtagtgagaatgggcatccttgtcttgttccatttctcaaggggaatgcctcctgtttttactcattcagtatgatgctgtctgtgggtctgtcatagatggctcatattattttgatgtattttcctttaatgcctagtttcttcagggtttttctcatgaagagatgttggattttattgaaggctttttccaaatctattgagatgatcacatggttctttttaattctgttgatgtggtgaatcacatttattgacttgcgtatgttgaaccaaacttgcatcctaggaatgaagcctacttgattgtggtgaattaactttttgatacactgttggattttgtttgctagtattttgttgaggattttccaccttaacatagataagcataggcaatgagtttctcagggataatggcctaaagttttcttttttcattgggtctttaccaggttttggtatcaggatgatgctggtttcatagaatgagttagggaagaattcctcctcctcaacttcctttttttaatagtttcagtacaattggtaccaggtcttacttgtatgactgatagaatttggctgtgagtccatctggtacagagctttgtttgtttgtttgtttgcttgtttgtttaggcagagtcttgctctgtcacccaggctggagtgcagtggtgcgatctcsgctcactgtaacctccacctcccaggctcaagygattctcctgcctcagtctcccacatagctgggattacaggtacctgccaccatgcccrgctaatttttgtatttttagtagggacagggttttgccatgttggtcaggcaggtctcgaactcgaccttaagtgatctgcctgcctcagcctcccaaagtgctgggattacaggcgtgaaccactgcatccagcctctggggctttttttaattggccaattttttgttactgattcaattttggaacttgatattggtctgttcagggtttcaatttcttcctgttttcaatttcgggaggttgtgtgtttccaggaatttatatacttcctacagattttctagtttgtgtgcatataggtgttcatatttgtctctgaggatgctttatgtttctgtgggatgtgttgtaatggcacttttgttgtttccgattgtgcttatttggatcttctctctttttttctttgttaatttagctaacagtgtattgctcttgttcatccttttaaagaaccaacttttggttttgtgaattctttggatttgggggtttcaattgctttcactttcacgctgattttagttatttcttttcttttgctagctttggggttcgtttgttcttatttttctagttcctgtaggtgtgatgttatatcattaatttgaaattattttttactttctgaggtaggcatttagtgctataaactttcctcttaacactgcttttgatacatcccagagattttggtatgttgtatctggttttcatttatttcaaataatattttgatttctgccttaatttcattcttttcccaaaaatcattcaggagcaaattgtttaatttccaggtaattttgtcattttgggagatcttcttggtactgatttctatttgtattccactayggtctgagagtatgttcatatgatttcagcttttttgaatttattaagacttttttgtggtctgtctttgagcatgttcggggtgtagatgaggagaatgtgtaggctgcrattgatgggttgagcgctctgtagatgtttgttaggtccaattggtcaagtatcmaacttaagtttaaagtttcttggttagttttctaacctaacctcaatgatctgtctaatactgtcaatgggatgttaaagtctcccactattactgagtagctatctaagtattttcctaagtctagaagtagttgttttatgaatctgggtgctccaatgttgggtgcttatatatttaggatagtgaagtcttcttgctgaattgaacccttcatcattatgtaatgcccttctttttccttttttcctgttgttcatttaaagtctgttttatctgatacaagaatagtgacccctgcttttttttgttttccatttgcatgacagatcttttcccaacccccaaaataaagggttgggaaaagatctgtctgtcgtgcaaatggaaggactatggatatccttagaggtgagatgggtctcttgaagagaggggatggatggtttttcttttctaattcaaccttgcaactctgtgccttttaagtggggtgcataaactgtttacattcarggttaatattgatatgtgaggttttgatcctataatgaagtttgttggttggttgctttgtagttgctattgtgtggttgctttatarggtctgagggctatgtaygtaagtgtgtttttgtggtagcaggtatctttctttttgtttccaagtttagaacctgctgaagggtctcttgtaagacttggtgtaatagtaactaattcccttgcacttgcttttctgaaaaagattttatttcttcttcacttatgaagcttagtttggcaggatatgaaattcttgtttggaatttcttttctttaagaatgctgaaaataggcacctaatctctcttgtcttgtaagatttctgctgagaagtttgctgttagcctgatgaggttctctttgcatgtgatcagatagtcactgcttaatcccagtatttctggtaaagaaaggaatggtgaactctgaaaagagtgaagggttgtcagaaatattatggataaaggatatataatctgtcaaaggttttgactaattaaatatggacttcctatatgtgattgaaagtgagaaggaaaaataaagtcaaagcaattctcaggtttctaataaaaaatgatagtgttagtcactgaaactggaaacctaaaagaagaartaagcatttagaaatgtggaattacatttcatgatagatgtctggaatgaagaaatatctgaatgttataagaatatgaggaataagataattagaggatttgggtaagtctacctaggagacaacttggaatgaagaagaaggtagcggatagagcattactgtctggcatcaactaagggtttattttaacaatcaagagcatccaagtagactataaaggctcagtttaaaacacaactcaagccgggcgtggtggcacatggctgtaatcccagcactttgggaggccgaggcgggcggatcatgaggtcaggagatggagaccatcctggctaatacggtgaaaccccatctctactaaaaatacaaaaaaaattagcgggtgtctgtagtcccagctacttgggaggctgaggcaggagaaaggcatgaacccaggaggcggagcttgcagtgagctgagattgcgccactgcgctccagcctggacaacagagcaagactacgtctcaaaacaaaacaaaacaaaacaaaaacaaaaacaactcaaagtgtaagcacccaaagggaaggtacttgtattgcttgccattgtatatatccatagcacctattactctacttggaacacagtacatggccatttgttaaataaatgaacaaacaaaccaagatagtgatgttatgaaaaccaaatgcaaagggagtttcaagaagaaggaatcacttatagtggcattaagatgtccttggattrggcaattagaaagtcattaaaaacctcatgatgaatagctgctgtggagttttgttggtagaacccagattgagatggatagaggagcaaatggataatgaagcagtggagatgttgaaaacygctttcaccttcaaaaatactgtcaaagagcaggaattattaayagataaaactagaggaggaagtattattgagaacactttttgtaagttaggagagatgtaagcaggtttatatgtagggaaggaagccaaaggaaggaagaaattcaagaagcaaaaaagggcatgactgataaggtatggtccctgggacatggaggagatgagttctaaaccagaaatggaggaattagtttaggaccaaaaatgggacttctctatctatagaatgttaaattggggcagtgaaagtaaatgaagagatgatgataacccccagatttatgatataaggtggtgatctctctcttttacatttgtaaggaggtaagaataagaggaaatacaggcatgatttctggtgtaaaagtagaaagtttgagaacacttattctcaatatgtagcaatgctgctatctttttaaaagggttagaagtgaagtaggaattctgaagagagtggtagatatttggagcaaaccctggcactagattatggagtttaacaagaatatgtgaaaagagctactgctatccaatggaagagtaaataataaattctagttgcttgcactaatcttctcaatgattgagttttcttcggtggcattcagtgtttttagtataaaaaccaaaaaataaagagcagacttagtctaaggctagctgttggcagagaagtatgatagaatggataaaaaccagggagttaaaagcacttggaagctagcctgggaggaggttggcaatcgtttaagttggtggagataactgaagcgctttagcatttgaacagcaaggggaatcagagggacaaaaggagtatgggagcctcaaggataagagatcatggttttgaatcataaaaggcagatttagctgggtgtggttccaaactgaggtgggagcctcagatgcagatagaggttggctcaggtgcttacctgaaatagccagaagcagcaagagctagaagatacctttgagcactcagggcacaaattaaaaatgctaatatttgtctggcacactggaatacacaaatgaggctggctgaagctgcaaatgactagatcaaggggtcctcctgctggaatgacataatattctagacatgcatgtaaccccctccaacctattccctgcctgtgctccagaacacacaacttaggaaaactctgcctttaggaaacactgaaggttgaaataaggaaaatcgggtgattaatgatgtagctcagaaagttaaggtgagagattcaaaacaaagataatcagatctgaatccagacaaacactggactgaacatgagtgaaaacagaaatgataggaataaaggaaaagtcaatgactgttgttacaaattggtctcatgcaccatctgacataggccttgtggtacatggatgagtcaatgcagaagcaaacatgaaggtaaaatttagagtccataattacaggaaaaggtatttcaaggtgaaaagaaaaaaggcctttctcactaattttaattttagttactcatgtaatacacaaccaagggtaccatagaaaattgatcaggatttttttttaacaggtaattaaaaagctgtagagtcaaatgaagttattgtgctctggaaaaaaaccccattattaaaatacaaaaatgtacttctcaaaatatatcctaatattttcctgtttagcactgtacaaattggaagttctcttaagtttgaaatgtttataaaataacagctttgtgtctcaatagaattttagatgctttattcttcttgaacatctttgaaggaatcatcaaagaagcaaaatgtcatctgcattgtcaaatgaccttgctctgtgatcttcgcagaaaataaacagctttaaatgagaagaagctgtcaattcaggccctgttacaataatgagagttcatcacatgctttatcctgtggttctgaattatagcactcttttatgtagttacattgtaaatcaccacccactatttataacatttctgtacttctagccaaaatatcaagtaaatcaaattggagatgaaatatttttggcttaaaccgatccaatatgttcttgctcctgacagctgtaaaactcaagagttattttacatcttagtgtttgaagtctaaaaaccacaatttgggatgacctgatgtattccaactaaaatcctggaaatctcataatgtcgggaaattagctgagaggagcatggacagatcatcgttactggatgaaacttacaggagaatcactgtaaggggccattaactacaaagccaaaagcaagagatcacgaacaacaaaatttaagaggtacccaaattggaattaaggtgtggctgttaagaggcttataacacgtagaggtataattctatttattctagaaagtcagctaaaggataaagagtcagagcccctggttgagcctggtaattattctaacaaaacatttatgtagaaagtaatcgctcttcttcaaggctgttgtaacaattagcgaaagaaataaaagaggactaaagggatgagctgaagcaacaatataaacaaaaatgaaactgttcaccaccccaggggaatattgtcataactgtgtgaggtttgtaagtaaaaacggctatgtcagtattattatcttaaaataatttaatgaagccacaggatgtctcacgtacatacaataaaacaatttaaattttggaaaataacatgtaatctagtctttgctctactactaattgctggggaatatgatactggctggggcccttctgttcttatattagctgtctctattcattggaatataacccttggagactcagtattctatgtcgaatatttctgaaatcgtttaagtgcacttctcttagcggttctgcctatgcttttaaaataccaaggaaacactttgggattcttgccaacctgtttttccagtataggcagaatttaaaagtgaattttcattcacaggtatctaggaacacatatttctcctccatacctctggattgatagcaactgcagtaccaagtggtgctttgggaaggcttaaccttccatctttctttcagcttctccccaccccctccccagtcagcatcaagattaatattcaatatataaaaatagtatatgcctgttatacaaaaataagcttcaggaagagttatcttgcttcccttccaaggaaattaccatcctacacccatcctacatctagtatcatcactgagagtagcttcgtacactgaccaaatgcatggacagacactgacccattccagggacaagctggaagggacagataccatctttatgtgtaagactctgggaaacttttaaccttcccaagtctcacattgttcagggttgttgcaaggactaaaatgaaataatgcattgcgaagtgtttggccagtatatggcaaatagtaagagctcaattaaggccggacatttttaatattattgttattgttcttattactgtttattgcaattttcccttgcaaatggtttatccaatgaaaacatctaagctaagaaccatggagatgtataggaaatgaaaatatcatataggttttcttggatgacaaaaagcaaaagaacagactatgacaaacaagcaaacaaacaaacaaacaaaaaacaaaaaaacacacaaacaaaaaaacacaattctaaaatatgctgactctgatttgattatttagagaacatttcagtctcttcaattacctcagaactatcagtataaccattaattttcatttttctagcaaagaatggaaatctttgctactaaacaatgctgaatgacaatgttaattcaacaagtattaacagaatggtgatcatatagaaaactcgtgtgcttaccggaagggactgtatgtagggggactggataaagataagtaagaaagtgtttcaaatactttgcaatataaggaagagggataagaacaagagagagaagaaagagagagaaagaggaacaaagttgtaaacaatcataagataagacagaattgaagtgctgtaataaaggtgaaaatctaaggatttgaaagcacagctgtgggaaggattgattttaactggcaagactgatgaaggtttagtgagagggttcatttgagctggcatttaaaagatgaataggatgtcaataggtgtgaaagaagacatttccaggatgaactataggatcaaaatattttggaatatttggaaaacataaggacaacagtcaaaaaagcagaatagggtggggatggagcgatgaaaaacctgaagggtgttgagtaatgggatgtaataataacaatattaatagtaatagcagtgggaacagtactgagggttatattactaatagtagaattcattaagtagttaatacatacttagtacttttatctcattcaattctcgaaaaccaccactctttaagagatgtaccatctctgccttttttagaggcacagggaagttaaaaaagttgccagtgcacacctaggtagtaagagacaaagtcaggattcaaaacccatctaatgtctagagctaaaagtcactgtcacactagctaatattactatgaatattatttctttcatatgaaaactaagaaataatacaatctattttctccacataaaagttggatccaatgtatttcctttttagcaaatagatagcatacattgtactcaatgtgaaaatatatgccgatttttgtttctatggtaaatgttattacgagtttaaatgacatccttgaaacataayatataccattatttccagtgaggaaatcaaaccctggtttagaggcccttcttgtaataacaagggattataactcagccccaccattcctataattaccagagaatacagatgctagaaggatggggtaggggtgtgaagcagagaaatgtgtgtgtgaagcaagtttgtgaaaataaaagctctttattcttcattttcatgcttctcagaccatgaggatctggagttggttacaatttgtgcagggaaaaactcaagctgtgaagcaggcaaccacggcaaacttgtcttcagttctatgtaccaatcatcaagtcttccttaataggcagattcccttgtacctaagatattgcagtgcatttcataaaacacagacataccaaccataagatgaaaaacactcttgtgtaagtaataaagaataatgaaatggccatcaagctayagtctaaaactttggtcactggaccataaatggggatgccaaattgtattatgattgggattttgaagtcttctccaatagggacagaagttatgcatgtgtgtaaacattcccctccaagcaaagatgaygactagaagtcactgccacaccagctaacagaataaactaccaccagtttgatgcaaaatcctgacccaagcttttgatcctccagttgagatgcagctgccacatggcaatcttgctcacaagcaaacagaaacctacatgcctgctagtgtctggtttttaattttttgaaatcaatataattttctcctactaaagggaataaaaggtagctaactgatagtgatccattctttaggcttgattttttttaatcctctaaataaatcttcactgattagcaattgtagtagttctaaaaattgattgatggaaaaaagacacaggccatatgtgtggtaagatatcttaataaaatgctgtttgtaaagaaaataaaaacatccacagtttcaagagatatttactggaacctttattttatatcctctggttatggccatggagccaaatgaattagaaaacagaggtaatgatatagatatgccatgtaaccttcaactacagtctcaaatgatacccacacttaagaatagatattttgctctggttgacttacctagagggaaagggaaaaaaaaaaaaaaaagaacagatgtctcggaacagtaatcaaaaggaacttagaagggaaatattgctaagaaaatatttagcagaaccatttgtaaatgcttaatagaaagagcttataagtaatttatatgaattataaaagtaaaggtttatgctaaattttgttatgttgcttcaatatcatttctagttattttctgttccttaagtaattctgcttaccaacaacctctcaaaatattgtagaacatttgggacatttgaaccaagttgtggctgttgtcaaaatatcatttcatcttttaagcacggataattaatatttcaagatttatttataagtataaaacagatttcaagtgatcaccatttatctggttggcaattaagttagtgtggctttctacctgaaataagattatgcttttgagttaaggacaattattagctagatcctgccctatatatgactctaccaaactaagcttagatggggcaaaagtaatgtcagagccaatgccttaacttccaaactgggtatcttcaatgacatcttttgtgaagcactcctatcaagaaattttactgtgttatattcaggaacattctggaaccaaagtttctgtttgctacattgtaggaaagcaacaatagtatgcactgctgtaacttcttttaaagtaatgttgcagcttctctgaggaatgttgcaggtggattctccaaggttgctaaggataagagaaaatgtcttcagcattttttttttttgcatcaggaaagagatattttaaaaatcagatttagtaaagaaaatggcattccaataattccaatagttttgtaaatttgtttttataaatatggttcttagctcctcagctcctcagtttaaaacaaaaatgactatttaagttcacaagaactaaactaaacctcccctcatcaataatcacctgtcaactccttttcatccaagaatcactgctattaagggtatcatacacctgtgagtggcgtatcaagaattggctgtgagatgttaaaacctgcacgaccttgactaaagtaaaaacatttccaagtacaattcatttaactacgccattatactggatgacagggctgagactgagggagtatagaatagcaaagctttaagtcgcttgggatagacagataaaatgaagcggtacctgtctaaacaacagatttgttataactagtcatggtatcctcaaagtctttactctgggaactacactgattatgccagagttcaccttatcactgacrccacaaaggcatttcagacacggatcacacttgcccatcttgattttacagacaggaaaccagaaacgacaatttgtatgaaaagtggaatccaggctttcatttggcattaatatgattttagttactaaagaaattcttgttctaaatattttgctttttacttaaataaatcagtattttggtaaattttggcttttgttacaagctgtacaaaatgaaatatgttttcttggcctcmtatcctttggaaatagatgaaagattttattaataattaatttaaaattcttttaatttccatggtattttccttcgacatccaaatttttaaaagaatattcttattttataatattgtaaaaatactatatattcatttttagatttgaagagttagattcaaccattcaacaaaaataagaggggaaagaactaacatttgctgatcatgtctactatgtttaagcactgtgttcagcaagaaatacaatagccttgaaataatcacttgctaatggagaaggtagatagctaacactaaccttggtcccctgtgacaagggtggcagtagaccattcattcattctgagtccatggattagaggctggtttattctgattgggagaattgcaaaaggcttcacaaactacgtaatatttaaactgaaacttaaagaatgaataccagtggtattagtaatcacaagtactgctactgctgctactacttacatagcacttgctatataccaagcattgttctaaaagtcttatatatattaactcatctaattctcacaactctgagaggcaagtactattactcccattctacagataagaaaattgaggttcatagagattaaataacttgcccaaagacacacaactaataaattgtggagctggaatttgatccaaatggtctaaccccggactctgtgcataactcctatatcaaactgcctctcatatggaaattcaccaaggaagaccattaacaggccaacccaaatggagggaataatagcatatcaagagttatgagataaatgattgtgctatcttcaaacactgggctccttgaacatctccctcaccatctaaataggtatgtgaaatatataacactcctttcttcccaccatatggctccaattcagttgttctgataggagagaaagagaagaaaataaagtgcacaaaagcatggaaatcgattttatccagaagtaataattatatataatggaatattaaaatggaagttttggctgtagccccaagacaataattagcacattcccaaagaggtgtaaggccatatgttgaatttccaaaggaggattctgagaaaccagttacacaattctaaaatgctatacctacatcaaagtcctagtatctgaaattaaaaaggggaacttatttggaaaaagttattgataagctgtgatttttgctctgaagaataggagatctctttcctcacctcagcgtggggaaagaaacttcarcagaacctctttagaatccctaatatgtgtcccctgcattttgatgtgcgtatagactggtgtctgacccatgtatatgagaaacctraagtccaagtgactgtctagctctacttatgctggagcaaagagaaatttgctgagtggggaatcaccaatgcccaaattactctggggttcataatatgtgagtgtttccctacggaccagttgtgggcattttgtaagaaggagtcagaatggggtcacatctggtcatgtcaaagaagatcatctggaaagggtcaagatctcaacaaaaaacacaggagggaycattggctttattagcaagaatggaaatgcttccttaggcattaaataattgcagacggcagagtcaataaaagcattcagaagtcagtgagctttaaaatcctccaagtccaggctgggtgcaatggctcacgcctataattccagaactttgagaggctgaggtgggtggatcacctgaggtcaggagtttgagacctgcctgaccaacatggtgaaaccacgtctctactaaaaatacaaaaaaatgtagttgggcagggtggtgcatgcctgaaatcccagctactcaggaggctggggcaggagaagcacttgaacccaggaggtggaagttgcagtgagccgagactctgccacagcactccagcctggatgacagagtgagactctgtctctaaataaataaataaataaataaataaatattaaaaatcctccaagttcagacagcaccaatgctagactaacattatggaacttatcaaggaagaactttcctatcactgtttcctcctctccctcccagtgctccaaaccagtaagagtcagaaactgatgttagcaaattgaaggtagaggagaagacaaggtagggaaagagagaggagaccaagtatcctttccccactgcaggtttcctgcctcaaggagagaagctttaactttaaaaaatattagaatattaaatataacatgagctagatatttaaattattaaattgaatccgtattcttacctccgaagctactgtagagagtattattatctaagagagtctgggaaagtcatgggacttacctgaacttatatcaaggcgtaagaaaagaattgcttcaccgagtggatttaaacagatatgaggtaaatttttacaaataattacatctaacaagttgtgctaagtcaacataacagctacatacctaacaagctctgcattgcatacccacacacatgtaattctgctcacttctgttaacattgtaaaaggcagcacaggaagcttgagtctggctctggagccagtttacctgagcttgcctcaatttcttcttctgaagaacaggggtaccaacaatatatacttcataatgttgatgggaagattaaataatatgcaaaggcatttaatttaatgcttggccaatagtaagcattcatacataatatctgccatgcttgttgttgttgttatcaatattattaataatcttaaaggcgactgggagtggtggttcacgcctgtaatcccagcaggttgggaagccaaggcaggcagatggcttgagctcaggagtttgaaaccagcctgggcaacatggcaaaaccctgtatctataaaatatataaaaattagctgggcatagtggtgtgtgcctgtaaacccagctactcsggaggctgaggcacgagaatcgcttgaacctgggaggcagaggttgcagtgagccattatcacatcactgtactccascctgggcaacagagtgagactccgtctcaaaaaaataaataaaataaaataaaataacaatattaaaggccccttttgacccaccttacctgcaaagaataatcagggcagaaggctcaccattatcacattttatctaatcacctcctaactactttcaaaccaacaaacccaaatattgccactgatccccctcctatgcaaaggacagtaataagtccagtctcaaaaaagtattgtttgtactgaatgcctatctccatgcactgtactatgggttctgtgcatattacctcatttgtttctcaccatattcgtgaggtggctacaatcattacccccattaaatgatgaaaaactaggacttaaggtccttgtccatggtaatacaaatagtatatggtagaagtgggataaacagttgtattagtctgttttgttttgttttgttttgttttcacccaggctggactgcaatggcgcgatctcagctcacagcaacctccgtctcccaggttcaagagattctccagcctcagccccctgagtgattacaggcacatgccactatgcctggctaatttttgcatttttagtatagatggggtttcaccatgttggtcaggcttgtctcgaactcctgacctcgtgatctgcccgcctcagcctcccaaagtgctgggattacatgcatgagccactgtgcccagccgtattagtctgtttttacactgccataaagatactactggagwctgggtaatttataaaataaaagaagtctaattgactcacagttctgcatggctggggaggcctcaagaaacttataatcctggtggaaggtgaaggagaatcaaagcatatcttagatggtggcaggagacagagagcgcatggagaaactgccaaacactttttaaaaccatcagatctcaggagaactcactcactatcacgagaatagcatgggggaaactgcccccataattcagtcacctcccactgggtccctccctcaacacatggagattggaattggagatgagatttgggtgggacacagaaccaaaccatactaacagtcattgtcaacatttctgctaatttatgataatcaaagttattttcattttggggtgaagtctttaatgtactttctgtcatagggacttcactaaaggtcactagtaactcaaagcaatgtatctgttctcacttataactgggagctgaaygatgaaaacacatggacacatgggtggggggaacaacccacactggggcctatcagtggttccgggggagggagagcatcaggaagaacagctaatgggtgctgggcttaatacctgggtgatgggttgatctgtgcaacaaaccaccatggcacacatctacctatgtaacaaacctgcacatcctgcacatgtactccagaacttaaaataaaagttgatttttttttttttttaaaaagcaacgcatcttttatgaagaagcaattcttctttagttttgggaatctattgaacattatgaggtaaaatcaaagaggtkggcttttaatttcaaaaagattaaacatgaaaacatgaaagattaaacatgaaagattttcatgttaagagtattgtgatggctaatatccagtgtcaacttgattggattgaaggatgcaaattattgttcctgggtgcgtctatgagggtgctgccaaaggaaattaacatttgagtcagtggactgggagaagaagacccaccctcaatctgggtgggcaccagctaatcagctgccaacgtggctagaataaagcaggcagaagacaayggaaagagcagactcgctgagtctcccggccttcatcttcctcccgtggtggatgtttyctgccctcgaacatcagactccacattcttcagcttttggacccttggacttacaccagtggtttgccagggactctcaggctttcagccacagactgaaggctgcactgtcagcttcccgacttttgaggttttgggagttggactggctttctttccttttctttttcttttttttttttttgagacggagtctcgctctgttgcccaggctggagtgcatgccatctcggctcactgcaagctccgcctcccgggttcaggccattctcctgcttcagcctccccagcagctgggattacaggcgccagccaccacgcccagctaatttttttgtattttcagtagagacggggtttcaccgttttagccaggatgttcttgatctcctgacctcgtgatccacccgcctcagcctcccaaagtgctgggattacaggcgtgagccgccgcgcccggccgggactggctttcttactcctcagtttgcagacaccctcttatgggacttcaccttgtgatcgtgtgagtcaatactccttaataaactcccctttaaatttacatgtatcctattagttctgtccctccagagaaccctgactaatatgagtatatacaaaactaaatcataattaaacacatgttgcagctgatgggcgtgactagaaagaggtatcaatttaagtaaatttaaaacacaatatccaatcagctgaactctttgaatgtcatattttactttatatcttcatttaacttctcctagactcaggtccctagtatctaaaataaaaatttgccatgagaattaagggaaattacatatacatatgtaaaaactacttttttaatctagagaaacctataaaatgttaacacttattatgtttataagaaatcttactgtattttagtatatagaatatcataaaaaatataaatatctagctgcccaagtgtgtatagtgcttgatctatagaaggtgctcaataaatgttaaatgaatgaatacagatgctctgagtaccttgctaacagcaagaatgtatttagtatttattattgttattattccccccatcataataatagtggaggatagtgcccttatctgtttgtcattgcaataatgaactctaccagcagtctctgtaatttgggggtgacacaggagagggagctcacaaagacacactatacacgcaatggtcctgaatcctgaattcaaactggtgtctctgtttttgtagcttttcttcccccaaatatgtaggcaaacatactaatacaaccatgaaaaaatgccattaaatataataccttgcaataattaggtgaagaattcttgacatgctcaaattttatagtaattatttatatcataagtatgagattataaagcctgttttctccgttgacttcaggatgaagtcgataaaagggacttaactaattattataatctattaatcattccatacttactgagcacctactaggtgccagctactgaactaggtgctgaacaaaaaaagtagtctctttgtagagttcttagactagttagagacacaaacagctcaccagcaattagaaaacagcatgtctgctacaaatggggaattaatgaagactataagagcatacaagagggatttttcagaagagttctccaggcatagtgatgtcaaagctgagactgggtggggcggggttggagaaactgtactgggagaacatgtatgacggtgaagttcaaggggctggagagcatgaagaattcagtatcctggggaagggggtagtgggtagagagggagctgaagaggcaacaagggacaattcataaaaggacttatgagctaatactcctcaggtaataacactgaatgaaaatatttccctatatgtcaagcatattcattttatttcttccattgattattagtaatagctagctgctttcaaagaagctttcagaatttaatcaaaacaggaagaatacaaagacctaaaacaagtctctrtaatctttttctaattacaaacaaagaggtctttggaactgcctctccctaatttggcatgtgaattatgatttgagagcttgaaatagatatggtactgaattcatttgctctgaggaagaatagacacagatagaaagaagtcttttcctctaggcttataccagtttgcttttataaggattttgcaccttgtccacaaacatttggaactcatgggaaaattaatactccctaagcaaaataactggtttttttaggaaaatgtcttcaatttttctgatagaaagttatttcctwggtgcagaacaagctactacatatgcttcgtaaatgatcttgatatgtggtaaaagttgatgaatggaaaagatgaaggctcaagcacaatgaatttctttttttttttttttgagatagggtctctgtcactcargctggggtgtagtggcatgttcacagttcaccgcagcctcaaacttcagggctcaagagatcctcctccctcagcttcccaaacagctaggactataggcacctaccaccacatctggctaatttttaaaaatattctgtagagagggggtctcactatgattcccaggctgatctcaaactcctggcctcaagtgatatttagcctttgaamgtgctaagattacaggtgtgagccactgcacctggccttcaattgctttgataccttatcagttaagattggattagttgcaaaaaatagagaatcctaaaacagtgatttaaacaagatacaagtcatagttatgctgtctggtgctagtacgacagctctacagggttgtcagggactggtctccttctatcttaactttctactatgwtggttattattcccaagctagctatgtaagtgtcagttatcacatgtagaatttatgcagtaagatggatgaagaattgaggaaagcatgccctctccctgtcaagggaacctctgcgagtctgtacatagttctgcttacattttattagccaaaatttagttgcaacactctacttcactgacaagagagccaaggagtgttttttttttttttagataggttgcaaaragcccagctaaaaatgtgtgtatttctaagaaaagaggaaggaagagaaagagagaaggacagattttagaagccaattcccaatctctgccataaacatatattcatataaacttaaaaatgtgaatgtgtgctgtggtttgtatgtttgtgtacctccaaatttcatgttgaaacttaatctccaatgcaacagtattaagaggtaaggcctttagtatgtgattaaattgtaagggctctatacattaaggggattagtgtacttagaaatgggccaaacaaggctgtttggcccttcttccccctctggcccttcctccattatatgagggcaatgcattcatccattccatcatgtgaggatacagcatccaggtaccatctatgaagcagagggcaagctttcatcagacactgactctgccagcaccctgacctttaacttcccagcctcctgaacagtgagaattaaatttctactatgtagaaattacccaatctaaagtattttgttacagtagcatgaatagactgagacaaaaatttgcaccagaaatggggtgctgctgcagcaaatacctaaaaatgtggaagcagctttggaactgggtaatgagtagaagctggaagaattttaaagtgcattgccatgaacagaggggcattgagggcaatactggtgagagctcaaagaagaagagagctgtaaacagagtgttgatcttcttagagattatctaagtgctttttaacagaatgctggtagaaatagacagtaaaggccatcctgatgacatcttagacagaaatgagaaacaacttattggaaactggagaaacagccattcttgtgatagcatgcaaagaccttggctgaactgtttgtctcctagtgtttcattcaagtaagaacttaacagcaatgaaatagggtatttggcagaagaaatctctaatcaaagttttgagaatgtggcatggcttcttttgactgcttatagtaaaatgcaggaagggataataaattaaagatgcaatttataatctaaagggaagcagaacttaaaggtttggaaaattctcagaagaaaaaagcatgttcagaagaaaacaccaagagtgtggccaaatgaccatttaattagaaaatcaggatggataaaagtgagagaggagaaaggaagaaaccagtcaggcagacagttagggtgggtcctcagttaatttgtttcaaacaaacaaacaaacaaacaaaaaaccagcctaaaaaatcaagttgctggcacaaataagggaacttgcccaggtggcttgcctaagacatgccctcagctgcataggtaagaaaggctatagagaagactgggctgtttgcaactatataaacaaaaatactccttggctctcttgtcagttargtagagtgttgtgactaaattttggctaataatatgtaagcagaactatgtacagacttgcagaggttcccttgacagggagagggcatgttttcctcaactcttcatccgtcttactgcataaattcyacatgtgataactgacacttacatagccagctcgggaataataaccatcatgcctgcaatggaaataaccgacatgcctgcaacagaaaattccatctcctgacacgtgcgcagtaaggggaacaaagcaaaatggagtaactcaagctgagcctgcatgtgcactaggaatatgcggtggaactaccaaaaatgcacaccttatgcaaaagagatgcccagccccttatcagtttcttataaaaacctctgtatccaaactgtgaatcagcaaccatttttccaggacccctctctgtagcagagagctattctctttctttcaccaattaaacttccactcttaacctcattctttgtgwgtccacatccttgatctctgtggccctgaaacaaccaacttcaggtgttaccccagacaatgaggccacttcaaaaggaagccagatgctattcatcaagacaatgaatgaggctgggtgtggtggcttgtgcctttaatcccagcaatttgtgaggctgaggtgggtggattgtttgagctgaggagttcaaggacagcctgggcaacatggcaaaactctgtgtctacaaatatatatatattagacaaatatatatatatatatatatatatagtagacaaacacacacacacacacacacacacacacacacacgaaaattaggcagacatggtaacgtgtgcctgtagtcccagcttgagcctggcagatgaaggttgcaatgagccaagattgtaccactgcactccagcctgggtgacagagtctcactctgcctcaaaaaaaaaaaaaaaaaaaaaaaaggaatgaaataatgaccccaaaagcatttcagagattgttggggctgccactctcatcataggcccaaactgccagggccttgagggcagaaaagtttcaaaaaacagcccagggctcctgtgtgaaaaatttcaaaaagcgctcaggggttccttcccagcaccacctcaagtctctgctcccaaaattcaggtgcggtgctcctcagctgcaccagctgtggctcaagtaggcccaggtgcagcttgggccaccctgctggaacatagtgacaactctgcaggcatgcagmgtacaagagctatgggggcttggctacctccacctagatttcagaggataaccccaaaagcctcagggtccaggcacaggcagggctatcacagaaagcccctagtarggtaacacccagcagatccatggggtcaggctcagggtcactgcagagtccccattggggcaatgctcaggggagctatagggytggggatgccgaaaagaacttccactagggcaaatatccagtaaagctgtgtgggcaggactacttccaagaccctggaccagcagagccaccagcatgtaatttcagcccaggagagctgcaggagtaccactgcaatgccatgaaagctgctgtgtgggctgtgcccagcaaagctagggggcaggactrttctgagctttgcggacccaacttccaccmcagtatatccagaaagcagacatagagtcaaagatcattctcaagcctcaagatttaatgttctttgccttggtgagatttgtacttacttgccacctgtttccatttcttccttcctatttcycccttttgaaatgggaacatctattctatgcctgtcctaccgytgcattttggaagcaaaaacttgtttgatttcacagattcacaggtggaaagcaatttgtctcaggataaatcataccttgagtctcatccatatctgatttaaatgatatttagatgagactctggacttcaaacttctgagttggtgctgaaataagtcaaaaatttgggggattttggaatggaatgaatgtattcgtatgtgagaaggtcatgaattttgggggatcaggggcggaatgctacggtttgaatgtttgtggcagtccaaaattcatattgagaaattgagggtttaagatggcagataggaggcaggactagcttgcagctgccacttggatggacagaacagcctgtagagactcacatcgtgaacttttgctccaggaactacagcaggaacacaccagaaagccaagataatccacagaccctttgaaggaactggatcaccatggcaggctccctgagatgccaaaaaaactgtgagtctgcttaatttctcaatggggaggtttgtggtctggggcaagttttcagccctggtcactggctgcctggaaacagactcagtgccattggtggggcacagtgggaatgagaccagcctttaggactatgggctttatgggagcagggtgaggcctgtgactgctggctttcctccacttccctggcaactcagcagaggaaaccttaatccttctgggaatataactgcattggactgggaaccatacccccatctgccacagcagtcgcagcaagcccaccccaagaagaggttgagctcagacatgcctgtctctgctcccacctggtggtctttctctacctgccctggtagctgaagaaaaaggtcataatcccttgggaactctatggccctgcccaccacttgagaaacctgaatacttaaccagttgtccctagagcaagtttgcatcctccatataggaccacagctgatgtgctcttcagctcctggctgaaggccaaccaacaaaaaccagcgcactaaacaaaaacacagccaaggaccctcacagagtccactccattcccctgctaactccccgagagcaggtgctggtatccacagctgcaagacctgaagacagattacatcacaggagtctttgtagaccctcgctagtacyagcctggaacctggtagctctgctgcgtggctagacccagaagagcagaaatagtcactacagttcagctttcaggaatccccattcataggggaagggggagaacaccccatcaatgaagcaccctgtgggacaaaaaatctgcacagcagcccctgagtcccagatcttccctctgatgtagtctacccaaatragaagaaagcagaaaaacaattctgctaatatgataaaacaaggttctttaacatgcccaaaagatcacaccagctcaccagcaatggatacaaaccaagacaaaaatctccgaattgttagaaaaagaattcaaaaggttgattattaagctaatcaaggaggcaccagagaaagttgaagtccaaattaaagaaatcaaacacattatacaggatatgaaagtaaaattcttcagtgaaatagatagcataaataaaaaacaatcacaacttctgaaaatcaagggcacacttagagaaatgcaaaatgcactggaaagtctcagcaatagtctcatccatcaaacaagcagaaagaaagaacttgagaactcaaaaacaagactttcgaatttacccaatatgtcaaatacraagaaaaaagaattttaaaaaatgaacaaagcatccaagaagttcgggactatgttaaacgtccaaacctaagaataattggtgtttccacagaagaagagaagtctaaaagtttggaaaacacatttgaggaaatagtcgaagaaaacttccccagccttgctagagatctagacatccaaatacaagaagctcaaagaacacctgggaaattcatcacaaaaagatccttgcctaggcacatagtcatcaggttatctaaagacaaaggaaagaatctgaagatctgtgagccaaaagcatcaggttctgtaatggaaaacctatcagattaacagcagatttctcagcagaaactctacaaactagaagggattgaggtcctattttaagcctcgttaaacaaaacaattatcgccaagaattttgtatctagtgaaactaagcttcataaatgaaggaaagatagtcttttccagacaaataaatgctgagagaattcgccactaccaagccagcactacaagaactgctaaaaggagctctaaatcttgaaacaaatccttgaaatacaccaaaattgaaacttcttaaagcataaatctcacaggatctatagaacaataagacaatgaaaaatatcaaggtgttcaggcaacaaatagcacaatgagtagaatagtacctcacatctcaatactaacatttaatgtaaatggcctaaatgttctacttaaaagatacagaatggcagaatrtataagaattcaccaaccaagtttctgctgtcttcaggagacttacctaacacacaaggattcacataaacttaaggtaaaggggcggaaaaagacattccatgcaaatggacacccaaagcaagcaggagtagctattcttatatcaaacaaaacaaattttaaagcaacagcagttaaaaaagacaaaggacattacataatgataaaagaactagtcccataggaaaatatcacagttctaaatatatatgcacctaatactggagctcccaaatttataaaacaattactactagacctagaaatgagatagatggcaacacagtaattgtgggggtctttaatactccactgacagcactagacaggtcatcaagacagaaagtcaacagagaaacagtggacttaaactattccctacgaaaaatgaacttaacagatatttacagaacattctacccaacaactgcagaatatacattctattcatcagcaaatgaaacattctccaggatagaccatatcacaggccacagaacaagtctcattaaatttaagaaaatcaaaattatatcaagtactctctgagaccacagtggaataamattggaaatccactccaaaaggaaccctcaaaatcatgcaaacacaaagaaattaaataacctgctccagaatgattgttgggttaacaatgaaatcaagatggaaatttaaaagttctttgaactgaacgataatagtgacacaacctatcaaaacctctgggatacagcaaaagcaatgctaagaggaaagttcatagcattaaatccctacatcaaaaagtctgacagagcacaaatagacaatctaaggtcacacctcacaaaactgtagaaacaaaaacaatccaaacccaaacccatcagaagaagaaacataacaaagatctgagcagaactaaatgaaattgaaacaaacaaaaaacaaacaaaacccacaaaagataaaygaaacaaaaagctggttctttgaaatgataaataaaattgatagaccattagcgagattaaccaagaagacagagatccaaataagcccaattagaaacaaaatcagagataytacaactgatgctacagaaatacaaaagattattcaaggctactgtgaacacgtttatgtgcataaactagaaaacctagaggagacagataaattcctggaaatatacaaccctcctagattaaaccaggaaagcataaaatctgaacagaccaataataagcagtgagattgaaatggtaattaaaaaaactgccaacaaaaaaagtctgggaccagatggattcacagctgaattctatcagacattcaaagaagtcttggtgccaatcctattgacactaattatcagggaaatgcaaatcaaaaccacagtgcaacaccacctcactcctgcaagaatggccataattttaaaaataaaaaaaaatagagttggcatggatgctgtgaaaagggaacacttttacactgttggtgggaatgtaaactagtacaaacactatagaaaatagtgtggtgattccttaaagaactgcacattctgtacatgtaacccagaacttacagtataataataaaaaagttactgtatattaaaaaaaaaaaaagaactaaaagtagatctactctttgatccagcaatcccactaccaggtatctacccagaggaaaagaagtcattatatgaaaaagatacttgcacatgcatgtttatagcagcacaatttgcagttgcaaaaatatggaaccagtccagatgaccatcaatcaacgagtggataaagaaaatgtttatatataccatggaatactactcagccttaataaggattgaaataatggcatttgcagcaacctggataaactttgaractattattctaagtaattcaggaatggaaaaccaaacattgtatgttctcactcatatatggacacgacctgttcccccaaaacccattgaaataaaaaataataaaataaaatacaaataaattgatgaataaaaacaaccaaaataaaattcatactgaagcttaatttccagtgtgattgtagcaagaagtgggcctttaggaggtaattatgccatgagggcagagccctcattaatatgattagtgcccttatagaagatccaagggaatttatttgtccctttttgccctttttccacgtgaggacacacagcaagaaggcaccatctttggagcagaaagcaagccctcatcagacactgaatctgttggtgccatgatcttggacttgccagacttagaattgtaagcaataaatgtctattgtttatgaattacctagtataaggtattttgttgcagcagccagaatgaattaagacagtatgtaacctcaatatatttatttataaattatagacatactccattatgctattattttatagaaattacaaaatatgaacaaataattttgttaaagaataaaataaaaattaaacataaataaaatgtttatattgtctttccaatctcaggggattgtaatgtataaatcaatttggagactgctgctctaggaggcaataagtataaacatttagattctacttcttcaaattggcaagaaaataatcatagaatctagaaagtcttaggggtgtgaggtattccctagtctattgagggaaagtctatgtccacttaggttactactcagaaagctggactaatattgagtaatggcaaggctagacgcttaacgtagcctcaagaattacaacactagcatgtgagaacaacagtattataaaataaaaacatgaaaaacagagtgacaatataaattagtaagtattagttacatgaagactttgaggttatttttgtatatttgcttcaaatggtaacttttttctaaaaatgtgtttatagcaacatttctgaaaagcacaatggcaataacataaccaaaaggcttaaaaatgtttatatatcgtaagtaaacttcttmgacttctaagagcccagggaaagaaactatgatatcatgaaaattttataaataaagatatcccaatgatattcattattagaaacaggcaaaaatggttaaacaaattataatacagccatgcaatgaaacaytatgcgactattaaaaattatactttcaaccgctgggcatggtggctcacacttgtaattccagcactttgggaaaccraggcaagcggatcacaaggtctggagattgagaccattctggctaacacgctgaaaccccatctctactaaaaatacaaaaaattggctgggcagagtggtgggcacctgtaatcccagctactcaggaggctgaggcagaggaatcacttgaactgggaggcagaggttgcagtgcgccagagatcacaccactgcactccagcctgggcaacaagagctaaactccgtctcaaaaaaaaaaaaaaaaaaatttatactttcagagactatttgctgacatcataaaatgcccaacattaagtaggggatgcaatataacaaattaagtcacatatctccttacaaacctttctctccccctctttcacacacatggacattcctacgtacattacgctgataaattcctaaaaggaaaaaccacctgaattttaatgctatctagggaattctattagtggtgatttttatcatattctttaatgttttctgtattttctaaatttcctagcacaaatacatgtaacattcatataattagaactcaatgctactgaaaagcttactgaaagtcatcttgaaagaaaatatattaatgtaggttctcaaaattaaaaaatatgttaaatagttttataggtctagtgttgggcagtggagagctatgtggtctctaggtctgagaaaaggtagtttgaaggaaattcagatagtcaatttgacttcatgtggcagaatatgtctaaattatattttagatagtaattattcacattatagtaataatgcattatcaaatctttcatttgaatctgaatttgcagaattaacattgacattacttagataaaactctcaagtattaaatgaaagttaataaaaataagatgtgctattatttaaaatgtttttttwaaaaaaataatttccagttgctggcaagatggccaaatagcaacagctctggtcttagcaacagctctggtctgtagttcccagcgagatcgacacagaaggcagrtgatttctgcatttccaactgaggtaccccgttcatctcaatgggactggttggtcagtgggtgcagcccaaggagggcgagctgaagcagggtggggcatcacctcacccgggaagtgcaaggagtcggggaactccctctcccagccaagggaagccattagggactgtactgtgcactctggcccagatactgtgctttccccacggtgattccttctggtgcctacaccaccagagccctgggtttccagcccaaaactgggcggccatttgggcagacactgagctagctggaggagtttttttttttcatgtcacagtggcgcctggaacaccagtgaaacagaaccgttcactccccctgcaaagggggctgaagccagggagccaagtagtctggttcgtcggagcccagatggagctcagcaagctaagatccacttgttgaaattcttgctgccagcacagcagcagtctgagttcgacctgggacacctgagcttggtgggtggtggggactccaccattgctgaggcttaagtaggtggtttcaccctcacagtgtaaacaaagccaccaggacgttcgaactgggtggagcccaccccagctcagaaaggctgctgcagccagactgtctcctctctgagcagggaatctctgaaaaaaaggcagcagccccagtcagggacttatagatataacccccacctccctgggacagagcacctggggaaagtggtggttgtaggcgcagcttcagcagacttaaacgtccctacctggcagctctgaagagagcagtgggtctaccagcacagcgtttgagctctgataagggacagactgcctcctcaagtaggtccctgacccctgtgtatcctgactaggagacacctcccagtaggagccaacagacacctcatacaggagagctctggctggcatctggtgggtgcccctccgggttgaagcttccagaggatagaataggcagcaatctttgctgctctgcagcctccgctggtgctacccaggcaaacagggtctggagtggacctccagcaaactccagcagacctgcagcagagaggcctgactgttagaaggaaaactaacaaacagataggaatagtatcaacatcaacaaaaaggatgtccactcagagaccccatctgaaggtcatcgacttcaaagaccaaaggtagataaatccatgaagrtggggagaaaccagtgcaaaaaggctgaaaattccaaaaaccagaatgcttcttctcctccaaaggatcacaactcctcgccagcaagggaacaaaactggatagagaatgagtttgacaaattgacagacgttaagctccagaagatgggtaataacaaactcctctgagctaaaggagcatgtcttaacccaatgtaaggaagttaaaaaccttgaaaaaaggttaaacgaattgctaactagaataaccagttgagtgaagaatacaaatgacctgatgggctgaaaaacatagtacgagaatttcgtgaagcatacacaagtatcaatagctgaattgatcaagaggaagaaaggatatcagagacagaagatcaactcaatgaaataaagcaagcaaacaagattagagaaacaagattgaaaagaaatgaacaaagcctccaagaagtatgggactatgtgaaaagaccaaatctacrtttgattrgtgtacctgaaagtgacggggagaatggaaccaagttggaaaacactcccaggatactatccaggagaacttccccaacctagcaaggcaggccaacattcaaattcaggaaatgcagagaataccacaaagatactcctcgagaagagcaacctcaagacacataattgtgagattcaccaaggttgaaatgaaggaaaaaatgttaagggcagccagagagaaacgtcaggttacccacaaagggaagcccatcagactaacagtggatctctctgcagaaaccctacaagccagaagagagtgggggccaatattcaacattcttaaagaaaagaattttcaaaccagaatttcatatccagccaaactaagcttcataagtgaaggagaaataaaatcctttacagacaagtaaatgctgagagattttgtcaccaccaggcctgccctacaggaactcctcaaggaagcactaaacatggaaaggaacaaccrgcaccagccactgcaaaaacatatcaaattgtaaagaccatcgacactatgaagaaactgcataaactaatgggcaaaataaccagctagcatcataatggcaggatcaaattcacacataacaatattaaccttaaatgtaaatgggctaaatgctccaattaaaagacacagactggcaaattggatgaagagtcaagacccaatggtgtgctgtattcaggagacccatctcacatgcaaagacacacataggctcaaaataaagggatggaggaatatttaccaagcaaatggaaagaaagaaaaaaaaagcaggggttgcaatcctagtctctgataaaacagactttaaaccaacaaagatcaaaacagacaaagaaggacattacataatgggaaagggatcaatgcaacaagaagagctaagtatcctaaatatatatgcacccaatacaggagcacccagattcatgaagcaagttcttagagacctatctagagacttagactcccacataataatagtgggagactttaataccccactgtcaacattagacagatccatgagacagaaaattaacaaggatattcaggacttgaactcagctctggaccaagcaaacctagtagacatctacagaactctgcacctcaaatcaacagaatatacattcttctcagcaccacattgtacttattctaaaatttaccgcataattggaagtaaaacatgccacagcaaatgcaaaataatgcacatcataatagtctctcagaccacagtgcaatcaaattagaactcaggattaagaaactcactcaaaactgcacaactatatagaaactgaacaacctgctcctgaatgactactgggtacataacaaaatgaaggcagaaataaacatgttctttgaaaccagtaagaacaaagacacaatgtaccagaatctctgggacacatgtaaagcagtgtgtagagggaaatttatagcactaaatgcctacaagagaaagcaggaaagatctaaaatcgacatcctgacatcacaattgaaagaactagagaagcaagagcaaacaaattcaaaagctagcagaagacaaaaaataactaagatcagtgcagaactgaaggagacagagacacaaaaaacccttcaaaaaaatcagtgaatccaggaggtagttttttgaaaagatcaacaaaattgatagaccactagcaagactaataaagaaacaagagagaagaatcaaatagatgcaataaaaaatgataaaggrgataccaccaattcccacagaaatataaactaccatcagagaatactataaacacctctacacaaataaatagaaaatctagaagaaataggtaaattcctggacacatacaccctcctaagactaaaccaggaagaagtggaatccctgaatacaccaataacaagttctgaaactgaggcaacaattaatagcctaccaaccaaaaaaagtccgagaactgatggattcatagccgaattctaccagaggtacaaagaggagctggtaccattcctccygaaactattccaaacaacagaaaaagagggaatccttcctaactcatttatgaggcaagcaccatcctgataccaaaacctggcagagacacaacaaaaaaggaaatttcaggccaatattcctgatgaacatcgatgtcaaaatcctcaataaaatattagcaaatcaaatccagcagcacatcaaaaggcttatccaccacgatcaaggtggcttcatccctgggatgcaaggctggttcaacatatgcaaatcaataaacgtaatccatgacataaacagaaccaatgacaaaaaccacatgattatatcaatagatgcagaaaaagccttckamaaaattcaacagcccttcatgctaaaaactctcgataaactaggcattgatggaacgtatttcaaaataataaacacgatttatgacaaactgacagccaatatcatactgaatgggcaaaaactggaagcattccctttgaaaaccagcacaagaccaggatgccctctctcaccacaccattcaacacagtattggaagttctggccagggcaatcaggcaagagaaagaaataaagggtattcaattaggaaaagaggaagtcaaattgtctctgtttgaagatgacatgattgtatattcagaaaacctcatcatctcagcccaaaatctccttaagctgataagcaacttcagcaaagtctcaggatacaaaatcaatgtgcaaaaatccaaagcattcctgtacaccaataacagacaaacagagagccaaatcacaagtaactcccattcacaattgttacaaagagaataaaatacctaggaacccaacttataatggatgtgaaggacctcttcaaggagaactataaaccactgctcaaagaaataagagaggacacaaacaaatggaagaacattccatgctcatggataggaagaatcaatatcatcaaaatggccatactgccctaagtaatttatagatttaatgctatcctgatcaagctaccattgactttcttcacagaactagaaaaaaactactttaaatttcatatggwaccaaaaaacagcctgcatagccaagacaatgctaagcagaaagaaaaaacctggaggcatcacgctacctgacttcaaactacattacaaggctacagtaacaaaaacagcatggtactggtatcaaaacagatatatagaccaacggaacagaagagaggcctcagaaataatgccacacatacacaatcatctgatctttgacaaacctgacaaaaacaagcaatgaggaaaggattccctatttaataaatggtgttgggaaaactggctagccatatgtagaaaactgaaactagatcccttccttacaccttatacaaaaattaactcaagatggattaaagacttaaacctaagacctaaaaccataaaaaccctagaagaaaacctagccaataccattcaggacattggcatgggcaaagacttcatgactgaaacaccgaaagcaatgacatcaaatggcaaaacggacaaatgggatctgattaaactaaagagcttttgcacagcaatagaaactatcatcagcgtgaacagccaacctacagaatgggagaaaatttttgcaatctatccatctgacaaagggctaatatccagaatctacaaagaacttaaacagatttacaagaaaaaaacaaccccatcaaaaagtgggcaaaggatatgaacagacacttctcaaaagaagacatttatgcaaccaacaaacatatgaaacagagctcatcatcactggtcattagagaaatgcaaatcaaaaccacaatgagataccatctcatgccagttagaatggcaatcattaaacagtcaggaacaacagatgctggagaggatgtggagaaataggaacgtttttacactgttggtgggagtgtaaattagttcaaccattgtggaagacagtgtggcgattcctcaaggatctagaactagaaataccatttgacccagcaatctcattactgggtatatacccaaaggactataaatcattatactataaagacacatgcaaacgttatgtttattgtggcactgttcacaatagcaaagacttggaaccaacccaaatgcccatcaatgataggctggataaagaaaatgtggcacatatacaccatggaatactatgcatccataaaaaaggatgagttcctgtcctttgcagggacatggatgatgctggaaaccaacattctcagcaaactaacacaagaacagaaaacccaaacttgcatgttctcactcataagtgggagttgaacaatgagaacacatgtacacagggatgggaacatcacacactagggcctgtcaggggttgggggcccaggggagggatagcattaggaaaaatatctaacgtagatgatgggttgaatgggtgcagcaaaccaccctggcacatgtatacctatgtaacaaacctgcacattctgcacatgtacttcagaacttaaagtataataataataataaaaacaattgccattatgttaaacttcagattagagcaaaccttttgcagctaacatttagctcccagaaagtaatgcttttacttagacaagctgccaggactaaactctaacagcataaatatgtcactaaaataaaaacttttcaatagacaaacactgtaaggattacctggtttaagtttccaagtgtaaattcaatttgaaatgatatagytaaaaatctctgtggtcttaaggaatttttttaaacttctacaaagagaatgaacagttacagcttctactcactgatctgggtcttcagaaacacatcaatacacatagtacataagaaccagctgtaagagttttttttgtcaatacaaagcaaggtcactgcattatagaaagactcagcactctgtttatttcacttccataaagggattgttcaagggcagattctaaaagaataattctgagaagcattgaaacccctggaaaaacagacagctttagtaaaaccctgaatatctattgggatattcttggattgcattgtaaatagaagcaaagagtatatttaaataaaattgtttgcatttatctttatatattttaaactaaatgcctttactccttatttcaaagcaatggaaaggaacataaataccaagaaaataataaattaatagcaattatggtgactcactctggaaaatcaagataaataagaaaaacttacaacaattaaatgctgacaaaattgtaattgtaatgagggcctgccccatgctagacactgtaggttgctgagattactgttaatgcttcccaaatactgtattttctgtacacaggccacattaatgatagggaacaaggccggacgagggtgaaactagtgaggtgtttaatttgggcaccaaatttaaggaggcacatgcacacaaaaatccccttagtaatccaaacaaacaatattttaatgaaatatttttaaaawcaaaaagcagaaaatccatgatgaacaaaatattgaaattttaataaatgtctgtcagaaatcatataccaaatactacttggttcaagtggaaatgataaaagcaatttcacatctaaaaatgttttcagagtgaaaagaagataaaccttttcagtagaatgtcttgtttcttttaatactttcagattttccttaacgaatactctcttgagaacataatgggaaaacaacatccagaatctttccacttcrtccctcactaagagacttaaaaaaaaaaaaaatcatgtgtaagacacagggatctttaggagacagtcattatggaaagacagtgcattagtatttacaaagcaaatctcattatatatgatagacggttagaaccagaaaaaaaattttaaaaagaaaaatatcatgacaatactcctttagaaacatacttaatatttggctaacctcctgttttcctgttttttccattgtctagatgtttcaactgatttttctaagccttttacaaacaatcttttagaaagccaacattcaagcaactctaagaggccttgaggaaataagatgaaacattcataaaaaacaaaaacaagagcactaaagagaaaaaaagaataaccytgataaccagccaatgttctaggaaattttctttggaacactgaaacaagatctagctgtaacataataaattgtaataaggtaaagaaggtagctgcctcacagctgtaacacggcaagttagtaaccaggaaattctaatatttaatgactaaagataggtttgtttaagcctagattgcattttgtgaatgaaaataaatacttctaaattaatggctttctgatcatgtgtaacattaaaatattttatatccattcatattaaatgtcataagatttaaaaaaacctaataatatttttaaacaaaatgaaagaatacatggattaygaccttatataatcacatgcatcccaaaacctttaacttccgagtggttctagaatttagaacccacaaaattctcatcccaattggcgggaaagattattgaaattgctgatcctaagtcccacactaagattttctaaatcattatctctaggattagcacctcataaatggcacttttaggaaaaaacccctgtgatacttacatgtttgtccaagtttgagaaccactgcttaatatagaattttaacccaggcttttagaaataggcatgaagaaaatagctcctgggatggattttgaggtttagtgctatagaaacggtcagctacaaagcattatataggatatataatctcttctggttcagtcttattactgatggtaattacaatagatttcttgggatgcataattggccattactgtagaaaaaaatttaaaagtatgttttgatgcctttattgtcttgatcttaaactgtctaaccaatgatcatagaatttttggttttgtcttttaaaaatatttctgtgtcctagattatgagacactataattaccaacttttctatttatatatacacatttatatatctaatgattttacttgctgtgtttaaaaatcctggttatgattatattaaacaatacaaagtcactgggacactcactctattgttttcaagtctagtattccagggtctttggattctctggccctccattactacggcagcagggttgttctgacatcatgaagatcctctgatacacatctcctactgcttcagggacaaactggtagaggcaggcaggcccactttcagccaatcaaagaagaaacccccaaactctgaagggatgtkgggaagagaagagaaaacagcttgcctaaaagaagaggttgggttgacaatgtatcttgatggtcagcgggaaatagaaggaaacctgaatttgtagtaagacaaacatcacagattatygaatattacagctggaacagatttgagggaacaaataaataaggcctttcattttaccaatgaagaagtaaatacaagaagaggttaagtagattgctaagtcctttaaaggaaagaatctcataggtcaccacactaacacttgtttatcatggtttccatgaagttgctttaacttataatggagtatggagtataagcttttcctttgtagcagttatgctttataggaaatgcttggttgatgctgggggagcagaaggtaaggagaatgaaagaaatcactgcaaatatttccaaactccattgcttttttgtaaatcaacaattagttttaaaatcacctggaatccttctacctcaaataatctagttagtccaatgtgctttcaaactacctacttaaatagaagactctactcaacatgatcttagatattagaaaagggaatagaggtaagtatggatgacccacggtggcttcctttgatcagaatacttcttttcatttgctaattcatagccaagaagtggagaccaggtttactttcattacggattcctgcaaatgggcataatgccttctgacatttaacttgtatgaccaaaatcccatatagtgttatataggatttgtgtataaagaagctcacatttcaatgaaatgctgaattctaaactattacagcaatatcatgatacctcgattttctaacaaccacatgcaggaattgcaaatgtattcattacttgtggccctgaagtggacactcatattggtagataccaagaacacaagatagtacatcatgtctgatttttcaaaagaaaagcagccaaagagaaatggccaaaaaggtaagaggctttcatttgaaagtgtgtgtgtgagtgtggkgtgtgtgtgtgtgtgtgtgtgtgtgtggttagtagaagacgaaaaaagacaaaatagggcgggaatatagacagcggaggaaaattgtgtctaaacaccactataattaacttattttttgttcaggaatcattatggcaataaaaatagaaggacaaatgggggcccagctatctttacttcttgtcataaaggttttggggcaccatctaagcatcccagtaaatgggtcttaagtttctttctacaaaatctgcatagtttgaaaccatcatcacatttatttcactatcaaagaaattcttcgattatcatttttcctgtcctcttttcaagattatacatttccatcaaataatctatctattttgggaggctgtccttaaaaatgggtcaaaaggtaaaagataatcaacattcaagtcatagtgccacaggaggaaaaagtaaggtaatgaatggtttaccagctttttctgtgttttactgctattgtaaaaataatgatgtcccaattaatataatcagtgaatatggatgctacaacaagatgaataataccttatttcatagatgaccggggttaactaatggtccttgttcagaaagtccagatttaatagcctgtagaagtagagtacagtttttctatctatgaattgtactttttgtagaaatctgtcagctttactcagcagctatctctacctaaaggcatatctgttctggattaaatgtcagtcctctcttctcttcttcctgcttttctatgggtacagaaatagtttatagaaaatgaaaagttatttttgggtctagggatattaacttggattttgaattttggaaattcttgttagaattttttaagtgaacagatacacatctgcttaccgcttagtataaatctaattataatcmaactyataaaataatgttagaaaaactaatatacaaaagcaaattttcaaggtactrtaatatatttgccataagagccttttgctggtaattggaagattcagctttacttcactgtttaatcacccacaaaactgtttattgccctatatattcctccaacaagaacattatgctcttaacgtggccctcggagaaccagggaatacagcagggttacagcacgttctattttttttttcaaatattacatttgaaattaaattcaaaagacaaattttaatctgaccgtcaggctctgataacacatactccaattagtacatgcttgaactgaaagaggttattatttgatgcagaatgatacaggcaatggattaaggcataaataacaatatctgcaacataagctatgggtctaaaatattaacttttaattacatatggtcaatcctcagtttagaccataaaactatagtttttaaagaaactgttaaatattttgttcataaatatgtttactgcatgtttgtatatattcatttaggtatatttagttttctttctaaagcttttaaataaatacaacaattacaaactactacttttttattcaaaagtaactttcttcacaatcattagaaaaataaaactagctgccattagtaatttctagacaaaaatagagaaaagttaacagactggttatttaaaatactgtttaaaatactttttaaaacttaagtacttatttgcaattgtagttatgtagttctacacctgtagtttaagtttttacacagatatgcatattgtgtgatagccacaatctaaatatagcatcacgtatttatagagcacctaatgtgtgctgagcactgtacaaggcatagggatacagagatttaaaaaatgtctcttctctgaatgagctttagcgtatagtggtgtgaaagatatttaaacagatccttacagtgttctatgtaaggctatagtggagttgttaaaaggtgtagcggaactgaggagaagaagatgggtcttagaagagaagcggaagtttgctgggttgataagactgggacaagcatacctggtaggtgctgtaggaaacaacatcaggtgctacagcctggagggattagaggccatgcaaaagatttggttgaataagcactagtactgtagtttggtatttctggagcaagaatggaaaagacacagaaggagagaatatctggaagtattctatattgccattttaaaggaggtcattcatgctataggttatgaggagccatttaacaaactttatgcaaaaaagatgtggtaagatttgcatgtaagataaccttattagcagctttgtggatgacagatttaacagcacagttaaaggcaagaagactactgaagggaccactgttaaaatctagactagaaatgatgaacgcgtgaattaggatagcagatgtggagataagaaggaagatgcagacatgagacatatttaggaggtggaaaacaaatagtctgctctgattaatcagatggtacatgaggaaaagagagaagccaccagtgatgcccaggttctgttctggctcatggagaataaagaggtttgtctttagagacaaagcagaaataggctagtggctggagtagaaggaggtgcagttacatccattctgagtaagctctagatccctatatttacaagtgatgatatttagtaggcagtggaatgtagcatatatattttgaagcccagatggaagatataggatggaaatagtgtttgtgcctcagctgyttaaaatgttattttgaacccatggctagagtatactgcagagtctgaatagtcaggaaagaagtaggccaagcaccgaaccctgagaatgactgattctggaatgggcaggccataaagaatattagataggttcatgtcagggaaataaaccttacaaaactttaaaattatactcatgcgtacatttctattctacatgccaactgttaatttaagttacaggacttgttttgattactgcctttatatagaaaattgttaagaaagatgatcttaaatactgagagttttaaaaattatcctttccaatgaaagatactggcttgcacttagctttcagttatggctaatgaagagaggatttcaggctgtggaaagggaacccactcagtaagggtttgatctcttcctgtagcctttcttcttccattttttaagagaatggtttatacattttatttgtatgtatttatacatatttattgtatttactatgtgccagggagtgtctgaggcactatatgcagtatgtaatgaaagatactgaaattcctgccctggggagcttaaattcaagtgggtcagataaataacaaaccaaataaataagttaaatgatatagcatgttagttagattgaaatacgcgtaatggagaaaaataaagtcagaaagaggcatagggagggaatccagtgttggaggcaaggggtgaaatcagggctggcttcacgggtgtgcaayctggggagtcactgagggaaccacatccagaagggcttcgtatttggtttaatactcaccatcaccatctagagcttaataatttttttaacaagctattctgcattttcattttgcactgtacccctcaaatgatgcagttgactctggttgtaattttaaatacggtgggcgagggaggcctgtatgtgatgtcttttatttggatcaccagatacgctctccacatttctcttgaactctttgtcccagraggttatgtggattgtagtagtgggctcctttgccctctggcttcygatttggtacacataatgaggatccccagttgaagttcaaaggtcactgcttttctcaagggaggcctgtctacccatatctcatataccgggttctataagtgctcccagcccttgtccagcagtggtaacagctctgctttatcaggcctgggatatgcatatccttcctagactccctctgctccctgcccatacctttgttaaatctttcttaaatttttctactttgagtttgtcatctgtgttttgtcagcactctgacggaaaaaacctcattaggaaggcagcactggagtagactcctgaaagtggggaggggaagccatgcagctgtttggaggaagagaatttcaggcactggaaatagccgaggggaaggtggtagaaggaagtgggattgggaattcttgggtagaagtaggagtgatgtagtaaatgagttcagtttcattcatttaaagcttgaaatttctactaaccaccaagtaaatatgagataggaagaaaaactagaagaatatgttgccctaggagttagggaagaaaatgtttcaaggaggaaggaaggatggagctagtatgttaatgtagctgaaggtcaaataagatgaggatgaagaatggataagtgaagttagcctcttggagtcattattaacactgagaagactggtttctgtacagtgatgtgggtgaaaatctgactggagtggacttaagagaatgggaggagaaaaaacaccagttgtgagtaaagacaactttttgaaggagtttcacagtgaagaaaaggagagaaataggaagtcactggaggcagaagcagagagacagagattttaaaaaatatataggataacaaacagcacgttagtatgctattgggaaagatcttatagacaggataatattgatgactcaggagagagcataagaattgctaaagccatgtccttgtaggtgaaaggggatgagtctagtaaataagtagagtgcaggcctggctatgagcaagaagaggtctcagggcatgtgacattgagctatttagcagataataatcaatcaatattgactttcagtcttcctacagtacaatcttccaatactttgtgagcagttaggacgttagtatataatcaagatcttggagtttaactcactgttttgtcactgatgagctccaagaccccagacaaaaacatccaacctttgtgagacttagtttgcctttaattataaaacgtagtaactactggtcattgcagtgcctggaaaattaatgagttatataagtaaacctccccaggtgccaaatctctctgacattgctgctacagaacttcatggagagaaaaaaatgaaaagtgcttatagacagagacgtctagaaatgaccagtggagatcttttcacagtctgttacccgattttgttaaccttaaatttcctccagatgaaaggtatttagtctctatgccttaatactcactgtaattttcatttctgagaaaactgttttgtataaatgcacgtttagtattctacttgccattatttccatgagaatcttgcatgtgacacttgaccacagattcatcatccttggagacacagctcaaatgtcactgccactggaagacattcctgagtcacccccagggagaacatctccttcttgttcctattgtactctgttcatacctgtgctatgacactgaacaggctgccttgtaacgatctgtttacatttctatctcttccagaccatgagcaccttatcttaccttcctctgagtcctcagtgacttgcacaaagtagatgtgagataaacatttgccgaatgaatgaatttaaatataaatttctgaaaggaggctggtcaaataaaatagcatgatatgcgaggaaagatatggactaaatggatactaaggcagaaggtttgtataagtgttcatgagaaaaggaggttcatgatgcatattcttattaattctaagtattttataaagaggccctattttcaaaaatggctatggtaaaaagagtcagggaacacattcttgactaggctttaatattaaaaacagattttggagctgctttatttcctttcttggtaacatgtatgtacagacagacttagggatttacttgtttccttaagaaagtatatacatgcccttgttcaacttttatttctaggggaaccctgacatcaatgaactactgaagttatagcttcaataatttcaaataagagaggatacaaatgaattgagtttatgttgtgtgaattttcagaattgaacttcctggcagaagcaaagttgcttattattattagattcattctttcccaacccagttactccttttacccctgctgtgaggtctctgtctttgaattctttattaagctttttaacagacaatctgctccagcactttctgaggagaaaaaaagcttccttttctccccacaatgccagttaagccttccatttaatatgaaatcaagtggagacatctgtgctttgtcatcacaaaagaaaaccgttttatttttctaattattatctacttatcagccttgggttgagaattcacttgcttttgtgcyaccttgagaattcagtctcaattctccacgtccaggcctaagatagtatcattccctttctattagtgtttatctgcatctgccttagagaagttgtttacatccaatattggactacccttcacattaagtttaaattggaaacttctttttctaatagagataatctgtatagtgttcaggaaactacaataattcagcaatagatgaaaatgttttaaaactgtgaagggctctgaagctgatgttttccattatcagttgtttgtttaggtaaattacattaaaggtcagaaatgaaatgcccataccaacaactagactgagaagtggtctattactcactgctttcagcttatataaaagagtttttgttgtccmcaactcccaggagggcaactgctgggaaggaatgaagttcctagaagataccaatccatattgaaagggagcaacgtgttggttacgttttccttccaacatatcacagaattgaatcttttttggtctgtgctttctttttgttctacaatatatttatttcaaaatctctcatagcacttcaatacctggaatatctcaaaaggtttgctgactattgttaacagctctgactaaacacctatttcttactacaagygtagaacgccagataggatcatcacagtaggcacctcacaaaggtcatgcagaccttagaggaaattatggcccaacaagccacaggagccagagaagtcaaaccagatgtataagtgacataagtgggttggagaatagagaaagcaaacattgcaatgcagcgatatcaggtgaatttgaaaagcatctgctaccaaatacagggcttgctgatgagtaagggagaatgagagctgttggtgtatcagagcagttcttcctatggatggctgagattcaaagctggtccacctttcagccagtcaaactttaaacttttggtggcagcaaacatctctaacatagtgggattccagaaggggactaagtggtttctcagtctgtagaatatgagcactccactagaaaaacaaatgggaaataatgacttcttgacgatggggatggtaaaaaacgaaaatatagccattcctctttatctacctcacatcaagccctgctgactgtttagcaaacaaagctttccaatgatcaatgatgtcctttccatgacagaagaatcttgaactcatcaacctagattcgatatagtactagggtggaattaatgccatctctatttaggctggttataagaaatcaagaacactatgctgaagtccttcctaatgatctccaaaagtaaacatattctacaggaaggattcacagtgtcataaaattgaagtagatatgcatcaatcaagtacctctcaggagattttaaatttttatgaaaataaccatttatacttatcagatgcttactgtaggctgggaacttactatgtgtaaaggctaacctcattgacatgtattgtctaatgtaatccttacaactatcttgtgaagcaaatatgattacaaatccaatttcacagatgaggaacctgaggcttaaagagtttaaacaaacacttagctgttaattggcagcttgagcccttaacatctatgccatgctgagtataaatcacagcttattcatttctctaacttctgacctctagtgtcatcatgacaattgtcaggtctacataacataccttaaatgttctgtttgtaccaaagctaaacactgccagcatagctccctggtcaacacggggtccgtacctctgcccctgtcccactcctagcttctacctagactggggtcctaaaagcagataatgctttgaattctttctctaacagccatcatcccttcctttccaaagaatcacggaacttggcaaatattttaacagctattttaaggcatttaaaagatttaattgcaacttattacatttgcctcctaatgtatttccaaattttatttctcccaaaagttatataaaataacttcttagaggttttatctgggaaagagacttctggtaaatgtatcactttytttttttccccatcrgcaaggtgcttcagagtgctcaaaaatgtataaaatacttgaattataactacaaaattttaaatttctaaaattgtgggtccacaaaaactataaatcctaatcaatcaatctatgtaagaaaacaagcttatggccttcatggtaagaccactactggctgcaaaatggcacgttctgtgtataacgaacatgttcatttgaagagcttatcacattgcctgaacatcaactcccgtctaggcctgcctcggtgtcattctccaagtcacctttgcttcaaaatcttgtatttatccttcactcttttgtatccttcttgacctcttcacaagcaccaaatattattttttctttaagtagctttgtctgggagggcagaggtcagaggcaggctgctaggaatggactagtgaaatcctatggaggtttctaaggaaatcttatctgctgaactgagttaatgtccacttgtattttggacacatgcccagaagctagtggatagcagggtcttttataagcaatacarttcccaaaaaccgaaagcaaaaaataaaagataatgttcggagagcaagagcaagggcaaccataaacatatactccaccctgcatttgtttttgaaagcatttctcccatttcctattattattaatcaggatttgtttaaagtttaattttaaccattctcttttcctgtaacactatatgtaataaaaccatcctttgagctggggaatagctccatggtaacagattctcaaacatcagcacaggatggagcttttagtgtgtgatcacagttcagcaaaggaggaggaggaggaaaatgaagaaatccacattgggtttctttccttctttgggataacatcctgagaaaaagaaatcagaaatcttgagaggttactgagagtgggggaaggaaaatggagtcaagtgatagaacaagcttaacatttcaatatgctagttatggaatttcctttgttttagcttcctgaagaaatgaaaaatacacttcctattcaatggagaagaaaataactttcaaccctgacgacacactttccggcatatactgaatttgattcattcattcacttattcagcattcattgagtgcctactctgagcaagcaaagccctacggtgggyagtgtactagggtccaggttcattagtttttaataggataaatctttgtgaaagagtgttatatacacaacaaattaaatgtttccatctcaaatatctggctatactagaagccagacatcaaaatcccacctgaacactactaaatgggaaggtcttttatacacttttctaatagttaccatataacactgacaaaccacttaaatctttataaaaacttcataatttgcctgccaagttcagccaaacctcacaaattggagtaacttgatttaaagcagggcaatagtaaattagggaagtatttcaaataagggccattttaaactatcatcattgttgttggacagaaatcctccttaaagaaaactgcgaatattttatatatggagcttagattgtctgtaggtatatgggtgcttctaaagtgcttaagggtgtttaatataatttgttcttccaatcttgyttgcactattaatttggttaatgggttagtaatcctttctttatagatagcaggacagtaaacttcagcccagctctttgctaaattattacaytctctgaacaaatggggtgcagattaatgacgttttactcaaaggctttaattcacagaagccttaaatgaagcgatacatccttgtttccatttaatgaaaataataaagaaatgaaaactgacttgaatacaaggtaacagaactggataactacctgccaacattgaaatcatcttcaaagtatgccttctggcaaatgaaagggctctgaccacctactgacaatgccaactatataaccacttaaagatgaacaaaaaaagtacttacaatcctttcttgggtgcagtgagtctcacaatatgtcataaatacataaaatcatatggcacattaacaataaactaaaggggttttctgattttcaagtttttaaattcatttaatcataaagcaatatatgagtccccccactcaaaaaaggcaaatattcctatttgcactattcagccaaaaataaagtgaatagatgaaagaatatcatcacatgtaatattgtctacatcagtatatcacgattgagcttttaaataactcactggtattaagaattctctgtgtaaggcacaattaatatcaacaaatcctgtattaaaaaattgtgaacctgacaagtcaacaaacattttgaaatatttgctcataaggtagcacctaattataataaaaatccaaatgtaggakaatgaatatgtcaatgaaagagaattatgacttcaaagtgggaaaaagaatatgtagctccttttttgttactaaattactcagggagaaaatgttagtatttaagtgcagcatcattactcctgaaagaattactcataaatccatcaagctcaaaataaatgctactattattcttttacttctaatcttctagccaaccaagatgttattaaaaacattaaaaactagttaatgtctttgtggtttcttgtattgatcgaagatgatgaagggaagagctactggaaactataccgatccagtaacaggcttgaacttgaatcccaaacctcaatttttacatctataaaatgaagaaatactgctgacctagacattttgccgctatattcttattcagcaatctgaaaagaaaagcttaattaacctgtagaatagatagcaaaatcaagataaaagrtatcttgtagatttgaagagtacacatctactatgtaaaagcaggtaggataagaggaacagttttcatttctcctcataaaatattctatgcctataataaattagattgctaaggttaatggtgaatagaagtttccaaccataaacattatcataggaaattaaatactcacagaggaaagttatagacatatttatatcccagaagagaagacaagattactaatgagattccaagtttgcaaaaattgtggctgggctgaagaagttatcatgactctcaagatatgcccattaaatatcatattggggggacacagtatggactgaagagaatcatcaatgttttcaaaatttttttttcttcgatatgacattaccacaaccactttctatttaggattctatattcagtactcagtattttgtctatggttagggtatgctgctagtagatggagtaatggctaggtcataactactggaaatcattcactcatttgagaaatcttaaaatttcttttatttttaatttacatctaaacattgtgcagtgcgctgtctgtttagatacatctatacattgtgaaatgatcaaattggggtaattagcttatcaataacctcaaacacttagcttttaatactttatttactataatagccatctatttattaaatagaaatttaacacgtcttttttaaagtaggctagtatttccattagatttttaaaaactgtttttgctagtgctgtagttacaaagctgtgtaagttttgagkggtgtgcctcatcctattttttaaaaatatacttgatttgcagtgtgtggttgtgcacattgtgggtgttttcaggaccacatatagcatgttacagcagaaattccgtatcatgtggctataatttattgaccacgtaattattagttctaatgatttaattaaatataatttgttgtgactgtattggttattgagttatctacaaatagaataaattacacatttccaaataacataggagagatttatttaaatagtttaattggtgaaatacaatctaaagatagactatttctgactaatttctggctcttaataaacttgtatttgactccaatctggaaaggctttaacttgtcaaaaattaaacagtaaatgtggccgggcgcagtggctcaggcctgtaatcccagcactttgggagtctaaggcaggcagatcacttgaggtcaggagtcgaagaccaacttggcccacatggcgaagtcccgtctctactaaaaaatgcatatattagccgggcgtggtgatgcgcgcttgtaatcccagttacttgggaggctgaggcaggagaatcgcttgaacccaggaggccgtaagccgagatcgtaccactgcactccagcctgtgtgacagtgtgagacttcatttaaaaaaaaaaaaaaaaaaaaaaaaagatttttcatttcttatttgggaataggaaattttcatggtgggagtcaggggaagaaataaaatcacattaatttgccatttttaatcctttttgaatggtttcctttatgaaaactgagaatttacatttgtcctaactttttatttcattaagagaaaatgcttaatatcttgctttttggtctctctacacagaaggcagaaacgtaactgattagagattctgatgaattcagagcagttgtaatcagaaacttcaggcaattaagtattcaagggtggaacctaatgtttgggttcccagggcttctgaggaaacttacagcaattttcatgcttaattgggccattggatcctgtctgcgtgaggggagaaaaacaaggtcctccttgtttggcatttaaaatgacttcattaatgattacgtggaagcattaacttcagagtcattacaatgctatcagcatttcctgtttttcttgttctagtatttattttgcaagatgccaaactgacctttcagtctgtcatataatttatttatcctattaagccatattgttgttgcttatgagttggacagacttgcccaaagataaccttacctacaaaagaaccagtttgtgtttttgcaaaatggaaaagattgatgacagacacaagcaaacagaaccagaaagagatttcatgcatgggagaaacgatgttcctaaaccaagtttttaattactttaatttactttcagtatgggtttaaactggttcatttttaaataattgattttgaattgatctgtataccttaggattttaacgttaactctctcctagtgtcactctccaccctttcctcaggctaagctcatccactataacagtgtcctttaccaaactatttgctgatgacttgcaaatccacttctcctgcacacatctctctcctacactcagttatacaagaacgatacttagatataatcttgattcttcattctctatcttatgcctatcaattaatcatcacataccatatattcagtctctacctctatttccaatgttattctcttgatgcaagtcagcactaagcaggggaaggactggaacaatctcaatagtttcctaactagtcttcctgctcccatcaagccctactaaatctatgcttcatgctacagccaggagggtttttctaaagcacagaatcctggtaatgtccctactttgttaaaacccattgcttttgtcataaagcccctggcacggcacttaagacatttttttggaactggtcctctgcttaatctgtttatcagtgattgaagagaattttattgattgtctattatgtgccaagcactgttccagatgctggtaatatagcagtaaactagtgtgcaaaatccctgcccatgaggtctgttaatacagaaaagtagaaaacagataaacgcatacttaagagtttcaggactaataggtgctgtaactaaaacagataagagagctttacagaaagtgacttgggatgctgctttaattctacagtgattggggaaggcctccaggaaggggtgacatttgactagatctagaataatcagcagaaacgtgaaaaacggaaagaagaccctgcctttaaagagcctgggactggaatgaccttgatatgtttgaggaagggaaaagaaaagaaaggaaaaaaaaaaaaaaaaagaatgaccacagtaaaggatataaggctggagtgataagaagcggccagatgcacagggctctgcaggccactatgcaatttcagttccattctgtgcactatgggaagctagctactggagggttttaagtagagagaggagtgacctgattttcacattaaaagcttccttcagctttcttcacttcccactctctcctgatgctaggctttagccataatgaactacttttggccccacaaatttccatactctttctccaggattgtatacatgttattccttcagcttggaatatcttcaatgcctccctcccgggccagcttccgcttatcctatggacctctcagtgcagacatcactgcaggaaggaaatctattctccaagctgaaatagacatccctcctttctcgttttaagctttagtatcatagcccttatagcgacatgttgtgattgcttactttcctatctctcccactggatcatcagctacttcaaaacccatgttgtctagtccgttcctgtttacccagcactagctcagagccctgatgtttacatatttactgaataaatgaaggagttttttaaaagtaataatgactattgattgcttacagggtagagatggcttaatggaaacatgcacagaattaggtgtgcttaaattttttgttaatgaaaataaacagagtatgctgctaaagtccatgtaaatgttctggtacgtttttgcctgatagcacaatttcatatattcctctggtccagtcttttgaatacattttcattctcgcagcacatttcttctgctgcttttctaaattattttcttgaatgctagtgctctttccttgttattttcgttacctgcctagaattgtatttgttctttcctggtcacttcttatactttatgtccagcctttttagctcttaaacatccacattcacttccatgccattttgcattcatctggcataacaggaatgacctcttgtacagagaacacacatgctgctgctttataccaccattcatttgcatataagcttttaatttagtagtcaactaattcctcattatgctgggattgattgtccagttaataaattatctaggtctcctccttcctttttctgctgtcttttggccacagcatttttgtattctgctagataatacgcagagaagagaggaagtaaaatgcaaattaatcaattttgatcattttgagcagctctcataagaagatctgatggaagacaaggttgaaattattggctcaactgagaattataagctgtctatgggtgtcatttatccatgctattctgatcaccacttaacatggataactggaaagaaaacgaacggaagaagaaaaaagaaataaaagttagtgaaaaataaaaagaaagaaaagagagctaaaagtaagatagacgttatatgacaatactgctgacccaataagtgagtgaagtcagccccggatttgaatcaatttcttctactgtatctcctgctggggaaacaatctgaatcttggaacaaataaccactcatctgactgacttagcacaccaaggatgaaaaaaccaacgggttgactatccgaactgttgggtttcataatgggtcgcccttgttcaagtagatagaagccaatgaagagtccccagtccctatgcattcatacaaacagagatgcccacatacatacaacagtaacgattatgttactgattacaatggtttcctgatcccaaagggacttagagagttgaattctttcttaaaatctagaagataaamctaatagtgctataaaatctcaggcacttaaataaagcaatagcaaactattttctgtaaagaactcaggggatggaagtgctcatacttaattcccttacgacgaatgtgaagccatgtgcatttatgcagggtcattcctgcataaattcaatccttcatgtgcaatgtgccccccaatataatggcactcattagtgaattacaaacatttctgtgaatatattaaaaggtttaagagaaattagcctttgtttataattaggaaacatcagtgaaaatgtattttatttcatgaacttttctgaataaattaaaattaacagtgaaatgccttccccctcccagtcacacttcttcacctaagttcagacctttacatttcatgcactgtcttgtccctgtcaaaatccttttgatgtgtttcatggcagttgatgttcctraagttatttttatacatacaatacagcaaacgttcctattgagcagatctgcatcttcacaggaaggtatcgaagactgtactgtgttcttatttgggcaactattacattaaagatgtacacagaaaagcaagtgttcagtgaaagaagtcttcctgaaggcactgggtcattaggcggatatagcgctcctgggacgtctgaccttctatgacattctaggaagacttggggttcctgtgtagcacatgtcactttatggcaaaaggaatatctgtctggcaaaatcaccatgtaattaacatgaacattgctcccacagagctgtgttgttcctggtgggatttacatagcacttgctctgtggggcctgtgctgtactcacagggtctatcagggatactcagaattcacctgcccaaggcctgggcaggggactgaaatgttgacaggaaaagggggaagacaatgatggcaatgtcaagggaaaattaacctttggaaggttctgacgggaawtatccagagtctcttcaaagaaggggttgctgttttagtgactttgcagcagaattattagaagttgagggtgagactaggtcaggaaaaccactatgagactgctggtttggacgagaatctcactgaggaggatcaagtcacacgttagtgttgatgctgttagtaagggggatgagggagctgcccagggccttcttgctacaggttgatgcctctaatcaataaagctttgagacataatgagaaaaaaacaaggctcatcttaacaggagaaagcagggctgaacaaatgaaaaggaccttggcagtggagctactggagcagggtggttgagagcagggaccaccagactgcctgactcccagctttgccactttcagctgtgtgaccttgggcaagttacttaacctagctgggtctcaagttccttatcggaaaacaagaaaaatacaattacctatctatcatgctggccatgaagcttacatgagctagaatatgttcacacatagaatagtacctgatacatattaaatgttarctaaacatacgagggtagagttactcaaaggacttatcgaaaaacatcaacacaaaacccaacgaagactcctataacacagaatatatgccagctataattctaatggctttacacatattacaaagtgtaatcctcataaaaaccctatgaggtaagtaatcttataacctccactttacagatgagtaacttgagacagataaaggttatacaaccttgaagtctaggatatgtacccagcacttggttacagaagatgtgctcttaaccactatgccagacttcctctatggtattaaagagaactcttagtcatgatcttttgatatcgcatcctgggatcggggctttctttgaggtctaactcaaagtagtgaggaaatctagcagcatatgaaaccctccaaaagctgcctggtctcttgagggtaattaggccttaatcatcagagtcaagggggagagagtggttctggaatactgatgtggtagaaaatggaataaatcttcccaatgctcctgaagtatccttctcacttgagacttcgtggagtctacacattgagaatggtgatccatgagcttcaggaatttggaaactgtctatatggcatgaggtcccacatctgtgggtaatgccgagtacaaccatcggccttcttgttctcaaggctcttctctgctgtctggtcaggagactcagctcctgcctgctggacccccaaggacagcttcattactttaagcagtcacccaatttaacctacggctgctttaagaacagcactatcctgcccagggactctgtcgtatcatagcttacttttccatagtttccacactatcatccctacactggctatgaccagcttggctacgagccccttcaatgagtgtgatgctgaggagtgggcaaatcctctcttgaagggaatgatgcttctctaacaccagtgggtaccatggaggaggctcttgttcagaaattatggctttagacaaggcttaacaaggtccacttctcttcaatagccaggccccttgactgcaatgagataggaccaagttggtcttgactcccccactcaagtcatttgtaagcactatgcaagccctgggtgtggagcactggacagaaaagctcagacttcccatcttcccagtattactggcaggaggccttatgcctgcatattaaggaccaagtgcagtaaatgacatgcactcagaactgtgcaaaggaacactccagtttcgaacgagaagtactatcggccatattcatttcttttttttttccctttgtcctttcaaatgtatactacccttaaaataattacaaacatggatttttaaaaagcaatttaactttaaagcattgaggagatatatattcccaaggcaatgtataaattccacgtaacaagacctaaaaaagggttctggtcatcttggagcaacgtttcacaagacactgtcaagcagaaaaagtggtattattagtttagtcactgtgtgctagaaaaccaaggattttcaagggtgtaaacaaatgaaatgttgaacctttcgatgtttcaaggtctctatactgacaaaatgttcacaacccgcctggggcgataatcttgcaactgcttcaagcaaagagcactaaatttacctcctaattggctgagacacagccacaaaaaattcaggtgttagaaaacagtaaaaatgaatcattagatcactcttatctgaagacagcctgaaacagcatctcaatctaatattatgaaatacttcatatagtgggtcctgtctagaacattaaaaaatcagtcattacgtatcaggtgcagggacagattaaatttagaactctggccaaacaccgtctggcaacatatgagtatagctataggaacaattttccttggactgtatttcccaaagagttataaacacaaaaacaaaaatgcaactacaacgaaacaactgtgctaaaacttttaagccacttaacctgttgtttagaaacagagttagcaacttggccatccaaattgagttyttaggtgagaaaggacaggcagaattaaatcagtcatttcacttgcaggttaatctgtccaggagggcaattaggcaagtgctcaatgcagttaatagtctattctttttttttttttttagtttctgtactactattctttaaactattttctgctggagctccaaatcatgacattgggtaaaataaaaaaaaaaaaatgtttataagtagccatttaaaaggaaggtagtattggaaacagacatattttctttctgtatctctagaaatcaaattactttctttttgtccttgataactgttgctgtttaaggtttcttgtatccaacaatactatgggaagggggaaggctgaaaaactttataagggtgccacattaaaatattgtatggtattttatagttttaccaaatttaaaaccaccagtctgcataataggcagaaaatattttacagagaagattgtggaatcagtaactggtaaaccttcagttacctaaaacctgtttttcctgaaacagggaacttgtttggtttgatcatgctctctggttggctagcaattgaaactgttcttcagtgctgcaaaccgcatcaagcaagcatggaaaaggcaaagttagtatgtaaaaatggtactaagtgaataactccagctgcttttcctggccccaaggcaaatagtcatctataaaaatattactttaacagtattttttactacttttatccagaaggaaacaaaaaacccttcacatattatgaaataatataaatctgttttaaaatcttaggaagttcaatttaaatatagttatgtgccacataatgacattttagtcaatgatggactgcatatatggtagcattttcattgattataataccatatttttgctataccttttctatgtttagatgcacaggtacttacacttgtgttacaagtgcctacggtatttagaacagtaacatgctatacaggtttgtggcctaagagcaacaggctatactgtatagcctaggtgtatagtaggtataccatctaggtttgtgtacatgtgctatataatgtttgcacaatgacaaaaaggcctaaggactcatttctcataatgatctcctgcatttagtgatgcgtgactgtacttatgtgtagaaatacacacatacacatccttaaattgtaaacaaaactccttagtgtaaaaaaataatgaactggttaaataaatcaatcctggcaaatccataggatggaataccatgcagccaattaaaatcacaccttcaatgattacttagtgatataggaaaatacttgtagcaagtgaaatggaagatataaaactttatatgctgtttcaattttggaataaaaatttatgcatatagaaaatatgggtaggaaatacattaccatcccaagaatttactgactcttgataatgagatcatgcctgttttcttttacttttctgcattttccaaatattttacgagtgcataatgcttaagtcagcttgtgtgtgtgtgtgtgtgtgtgtgtgtgtgtggttctgatctaatacagcttgtatgtgtagcttaaagtgtgtacatttacaaaacatagaactgatagtaagttgagtcaattgctatgggtagtgtcacccgaaacagaaaaattctatttaaattccaagtaaatacttgataacaattggaaacctaaagaagagggcatttgtatgaagtgttttctaaacttaaactagtagagaaaaccatgactagagagcagcccatggaggttttattttggtattccaagacacacacaaaaaatgttgaatgttttaaactttcaaatacacacatttgtctttagttcaaagccatacctagaggaaccctcaaaatacttttcatcttcaagtttcgttctttcataattgaaagctctgaagaataaaaatatgttttgtttttgctacatctaatgttactcttctttacttggagaacaaaacattaaatgtagagtaaagtaaatgtaaagtatggcaaccaccaaacagctctcaattttctcctctaaaaaaaaaacatgggaattgttcttaaacaggaagctgtttctccttgttagtattccatgcccacgcattaccctggttctgtggaactccagaggcaacaaagtcaacttgctattttaaaatacatgcataaaataagcaaaatacacacatgtaaaaaaaaacgcatgaaaaataacttattgaggaaggaacttataaacctcaaaatatagttaaaacatcatactcctgccaataataaayaatccgtaatttgaataaaataattcataataaacagtgactgtgtatgtgtgtaaattatctctaatgtacaccctatggatgtttaatgaacaccaaagtcattagtaattcccactccagggcagttagcatcagaagatcataatcaagagtccacactacagagatggttgtgtcatgcacttcaaatatcaccattatttctgtacaacagggtgagttaattcrcgtaagtaatgttaaaaacaatctttgataaaaatgagtggtatttaagagaggcggtttcccagaaaaatgatacaggtatctctacgttccatgaacgagagtccagcagcccaatagtcaaatagcacactaggtctcgagtttgctttagctgtgtggcccccttaactgaggacaccatcacytgagcagagcagaaggctttctgatcctaccactataatactgttgcatcttctagggagtgaagttttccttaaagctaattgttggagtagcttttccttaaagctaattgttgaattgagtaggaattaacaagttgttgactaactgcacttgcatactgataaatgtatggcagtattcagattataacttgttttcatttttaaaatggggaagagatctatatcttccacttatcctcaatttctagaaagtaccaatatttcttttgaaagcctgacgactataaaactcagcccatgggtcaccttcttggtcaagctttctctttatgcctcaagttgaaaagactayttcttactttatacctcccactgtatctggtattgtgtttattctatcttattgcagagggttgatttttaaaaaaatgtttgtcttccccactgattttgtgtttctttacacattgaagtgtggactagggaccatgtaaacttcatggtaacttcctgcaactttctaagacagggtttgttaatatgtgtggctatgaatttgacagcagctctgtgttaaacataaggaaggtgtgggaggataaaagtagtaagaaattagtatcactagaaattcctgagaatgtctcaaatcctttcccatgggccttcttatcattggcacaccattcagggatgcatacttcttaagactgcattcttgtgcaactaccacaggagcccagctyggcaggtgtgcctgaaaatcacttggttgggccacatctggaaaacacaggcaataacttcataaatatgtgaacacaactcttctgagctatgacaaccccacgagccatgtttccatgggggataaatagatttgtagcaatattaataagcaagatgtagtcatccgggacaatttgaaagcaaacctgctactaatgcatatttcctacagtaatatttttccctacaacctagttttaaccttgctgttccaataagaccccgtaaatcgaagtttctttagcccgttaatttaatatgaatattctataccaaagataatattgaggaatactgctgagaaagctgcagagctggagaatgaacactgcttctagaatgtcttatgttatataagcttcattctataaatatgtttggcagaagtgtcattctgcattaattttgctacaatatgtgttattctgaggatctgcaatagtggtggcttacagatccactatatcaaaatttccatattgacagttacaagggagaaaatcttaacgccaaataaactgttaaaaaagatatagtttggtggttacatatgcagtcttattttaaatctaattaattattttaagagactgaaaataagtctttcctgttctaaagctttgacttgtttttcatttattgttctgttagtctaaaaagggaaacctaacattttctaactgatggacagcagtgaattcctttttactgaaacacccacacttaaaacttcttggcagttkttaaggtagtgctgggttaggaagaagatgagactatgtcaactttactaagatgaacatctggcttctagagccaccaaatgaaggcaaaaatataggagctgaaaaatattttgtcatacaaaagttttccagtgaagaaatctaatggacagagagtctagaagctttaagatattttaaataattctatttaatacttctatctaataagaaaaacagactttaaattttgtgtttttacatatgtgacyaaatataaaacttaaagaaaagagtgtattaaacaaaatataggaaatagaatatatcaaacaattcagaattttgtcttcaacttaaggaacatgtatttagcatctatgtcattattggaagaagtgctgggatataaagatgctgataatctcttatgatgcacgtattcatcatcgtttacttctgttgtaagttagtgaatgattttattctcattgctgtagcattactattaccaccagaatttagcttctttttcaatgtaaaaataaactaaaatagagcaaacttatttttattcctccatatttcagaaagctctaggacagctgctcttaaattttagtgtatacaataattacttggacaagagaaccttactgagaagaataaggatggaaccaaagaaattacattttaaaataaggtaagcagaggatagaaacacaggtgctttaagaaccatcattttagatatgtggccctagaactgtaacagcatctatttttttttccaaatactattcagctataagtggtgtgttggaaaatgtttaacactttggtttcagtgtggtgaagctgatttgtagtgtctgcctattttgtggtgcaaattctctcaccatggccaaaatcaagtcatcgggttaaaatgattgaacatccagctgggaagtggtgctcagtgttataccattttgtccaccatgtagagtagtaaaatgcagtaacatgaatagaaagcgaagtcttgaggatttattacctttaattataagtaacgattttataaaatttgacttttaatcatggctacattttaayaatcaatcaaaaaactgaaaacttaataaccatctcccagaagtcaatacaaaccagtcccagcacaaactggccataagagtcattttattttgtccactttacaacagtctgatatataagtaacaaataaaggaagagattctactagttattcttatagcttttgttataagcaaataaaatgaaatcaaagttatttttatatgcaatgagtgtaaataattgtcttttcattcaaacatcttctatacctgaaaaatatagtaagttatcaaaaaataccaatggaggcaaagcaaatttgggtcagcaggcactgttcttactaaatttgaacaatggaggtttagttatcgagaaaaacatgacttgaactgaggtctggcagggggagaaaggcatttctgactcaggggaatttttggtgatgtgctactgtgtgtagctagttcttaaactccaaacagcatgtgtagcaaaacagtctacaatgcacagatttgtggtatttctaggaacagacagatggcttatctagtacttcccaacttttacggtaagcaaggaaaaactatttaagaggggtgttatcaccttgcagggccctaggacaccgcagcatattctaccagggattaactaaaattacccaggttaaaagagttaatatttattttcctggcaggatcttactcagccatccatgtgccatgctgataacaattgttactattgtaatagtaaggaaaatacaggagtaaagttcctagggaactgcctaactakgaagttagtaaaggatctggactctgaatttgatttaaagaaagaggaaaacacacgttggctataaaagaaataaatgaaataaccattgctacaacctttttagcacgggtactgtcacgaacatatcttctaatgttaattaaataaaatattttatttttctaccttttgtactgtctttaaaatcatctttgacacatgagttatttatgtggctcgcttaggtaagaatctcttgaggaagagctgagatatcctggttcctttttctgcttcattatgatttgaatgcttgcaccaaagcttcaaaaacaaggttgatccaaattggtattcaggaaattaagtgtactgttcaattcctataattgaattagaagctgactctctggattagttctctatatactagatagaaaaaggtttttgtgttaaaaaaaacaaactgttacggtttacactggtgctgaaaagaaagttgagaattcaccactggcaagcatattacttgaaaataagattttctcaaagtctctatatttctgcaaatattctagagctaattcccacatataaactgagagtacattcagaggtaaattttcaaactctattgattctattgtttcaggctcctctcacctctcatctcacaactcttcgagcacacaaccctgcttgcctgatctctctgcctcgctattaccccttccccacgttgccaactcacctctatgttcccctcccattctggcttattctcatttgggagctgattaatttccagaaaagtatcagctgattaaaaaaaaatctagaagtcttatcttacaaacttatctgtatttaaatgaattttacttacccaaacttaaaagcatatctctcatttaacaaaggagggtgcctttgctaaacccctctacttccccacagaacaggctcagagtgccagccttttgcttcagagtgcctgtctcattatttgcactccctgtcttgtgagttcagcagctgcatgagagagcagttccaccagtgtgggcttattatgtacagatgcaagcttttcattaggggactaattgagatttgaatagaatctttcaaggaaatggggaagatgctagaagttaagattttacatatgtgttccatttgttaaccttgaaacatttaaggataattattgatcatgagtttataagaatttgtagatcactgaaaaggcttttagttatacatactatgtttgttagcaatatggggcaaagcaaaaaagtatgtatatttttcaacagtaattaattcatcttgtggtataaaaatcatccatttattaaattgggagttgaagaaaggtgttcctatttttcctccagtaatgtaaaacatctatatccacgatacaatactgagtacaaattcccagcatagtgtgacatgtttcagtctacatattgtaaatgtaaactccacaattcagatttttaaattaatttttaaggtgaataaaatgtaatgcttttttgagttaagaatattaaaatatattctctaatttctaaatggcaaaaaataaactaccaaattctaatttgccatatggtattcttatttttttcatcaaatatctactcaatattgagtcagtatattttttctgagatatagatattttgtatttttccaagaaaaccatgcatagaatatgcttccaaaatggactaaaatattcattttcctacgttcagatataatttaggcaagatataaatggattttacctgacaatatgttatgaattgtcaaaactcttcatccaaaataaaacagacccatataaactattaacaacagactgtgcctaaaataaaactttaaggagataattataagggaagtcagcctacctaattatacttattttaataacaaaaagtacatataaagtttcattataattatatgtctaaggtgatatgctatacagctcttaaacttctttgaaaaattaacaggcaatagaaatcaaattctcttttccaagaaagagaatgatcactttcttcaattaatttaaagcctttccctttgaatatgaagtttatcctagtttctttataacccagtagtggttgtaagagctgagacctgaagattaatttagccgctagccgagtcagcccaataaacacctggaatgggctattctagtcggcaggaagatctggcctcctctcagccttacttcaatgtctccccagcatttaaatccagatgtacacataaaagagagattctgagatatccactaggcttatatcttatgacaaacatattttaagcctaaggtagatggtacaattccaatcctcagaaagactatcaaagtgagacaatacacatgactattttaaattaaaaataacagtaggggaaaaaataaacaaacagcataagaatctaacctgctatgtgtttctgacagttttagtacttactttagtattgtcaatttgacagtttcattttctgacaatatgttgtttgcttaaatgtgataaatgcagccttattggtagaggtgggggacagatggaaaggcacctctatgaaccacattagtcctttttaagactttttttgtaactgtttttgatggtctgtcaagcagtttgacacagtagtctcttcagggcatgtttatttgcatatattaggtcccttaaaaaaatacataaggaacgcttataaacccaaagcttaagctaacacttaataggtacttactatgtgctaggcactcagctacataaatctgtatcaatttgtcttacaccaccagatccttcagaaactctttgcttagaggtcaattaaatcttcagctatgtacaaaactatcacatgccttgggtaaagtatgggcataggagcatagaaattactgtgtccttggactaagaatagagattcaaaggacagggatgtagaaagatcagaaaagatcctgaaaatgaaactgaagaaaacgccacaatcctgaagcccaataaaataatgaagtaaataaattttagtgtgtaggctgaggcaatggaagaggaataagtaagggattattatgatttttcctgaaaggatatgagctggaaatgtgcgttcttgagtacaccgaggttggagcaggaacaggatctcgaggtgtataatgttaacaagattctttgttttctatcttgggtctaattagcttaaactcagctatcagggaccatacagaatagggaaaatgatagcatgctaataagctgagttttgtcattgtggagccctatatcttattgctagagattgaagcccagtattaatattaatattatctctgtgaattttataatagctttatcaagtaggtaccaacatcctcaattacaatgaggaaactaaaggtcagcaaaaataatttacttgtctgaggtcacagagctggttcttaagtcacaatttaagtaatctgttctttctagctcaaatcagatgttgtttctattacaacaggactaaatcatgtcagtaaatgccattatcaaatgttcacatgttgaaatatgggattttaaagaactgaaaaaatttaaacagtctgataattagaacaaacatttaaaaaaattactcctggtatatatagacagtcttactcaatggaagtgtgaatgtttaagtaaagggttttcacagcattttactatatcagggttctgtgaaaaattcaatatcaaacaattgaaagaggaagaagtctgtctcaggttacattgtattttcaatacaagaagaggaaaaatacatagaagtttaagaaaatgcagaaatgtatgtaaatgtggagaagcaagctctctaaggagtcaaaggtttacagagaacaggttagcacataatccaacaagttcattgtagtgtggagaaatgaaaaccatgtgacctgaacacattcctaaaccccatggagctttggtccctccataaaaagacattggactagcctatcattaagttcattataactattaaaattaaaaatcaagtactattaattttatgtcttttatggcacaaataaatattttcttcagaaggaccttagtgggtcatgcaagaacccacaataaaagaattactctccaatttgcccttcctttggatgacttactttctagataacaagaatacaataagtaatattcctcatcattggtataattcctaacctccgtcagtgttacagttagtaatttaaatactcgatagcaaaacctatggacttcttcagcaatggaaagaccttattttacttttaatgcatctgtctgcatggtctcaaaactcatgacaagtttttgcatatatttgatctttaaaaaatcatgtaacgactgcatctacttgcagtatcctccatcacactgaacagcacctcctcccctccccttccacattcaatttgtaatcaagacctttcatcttccaaataacycttgattccatcttcatctaccatgaagccatcatccatgaactgggctactgcccaagccactaaaaggatctgccaacatttacatctatcatatttccctctaatctgatctctgtgctttcaccagagtgatttttaaaaaatgtaaatgtgatcacccctcatccatgcttaaagctttaaagatgtatcatggttctaggataaaaacaaaacctctcaatgaggtctccaattcatgcagtggtcttcatcttagctgcacattgaaatcacttggaaagctcttttgaaaatcctaatgcctggaccccaccctggagatgtttatgtaattggtctggagtggggctggagagcagatttttcaaagctctacttagagctcccctgtgctaccagggttaacagccagttctctagagctgcactgtccagcatggtagccactcaccacagagattatactcactgacataaaatttaaaattataattccatgttaaatgacgtcattttaaaatgagatacaagaaacacttgtaaaacattttctaaaacatggtattagaaattacctttactcagaaataaggttaattttaacttctcatcaatatcatgacattctttttagaagaatagattcagatatgataagtaaattttggtgttaaaattacagtaggaggtggtagaagtcagaatgctcaattatgtctgaagtcctttttaccaaaagctattggtaaaattagattaaaaataaatgtgttttagccagaaaaatatccctgaaacaaggcttgtcatcttttaaaaatttgcatcaacacagtcttctgcttattatcacttttaagtaatggtcattttaaaataatatatcttcttattaaatgtctctaattctgttggtggtgattccacatcagtgtggctggatttaaaaatggttctggtgaccttgaaaatcagatgttctcaccctctaggatggtagagtcccaaggatctttttcagtattaggactatatacaatgagcttggagagcaaaaataaatcctaaggcastggrcttcccatagattttcccattttgtcattagattagaaaatagtgacttcttgaaggtgacacatctaggaagaggtgaagcaaagatagaatcagtctttccatcctctactatggtagtcttttcaggataccgccttgcatcaccaatgagaggaatgcatatttgtcaacagaaagcattataaaccatatccacttaattttattgcagagatgtttgatctgatcaacaggctatatcatcatataattattacaagtaaaaacctttaataatggaaaatatggtaataaaayttcaagaaactatgatctataacactaattgttccacataatttgtcaatggcacattgatatgtatttttctctctctttcatatttctatatctagtttttaaagagacttctgattccttgaaagggagaggctatcttaaggatctttcgtattttctgcaagccagtcccaaaccaggcatataacagacatactgtaagtccttttataaatgaaaacgatgaattcagaaaaaggatgcttactagattgccaatttctgtatattaacaataaatattataaagagtcttttaactaacatgttttcatgttttcccagtctaagatagaaacagcttcatataaagaaattagtttagtctaatgttcccagaattatttttataataagctgtatcaaatataatacatagttacttgaatctcaatatatatctatggaaaatatcagatgagtttttcagttgccctttgacactcagagacatttgaatgctagaaaaacataatttgcagcagtattaagtcactgagaacagatgagagttcaaataggatctgttttatcttttcacggagtaaagatgctaaaaatagcatgggcttaagcttgggctacagttttgtgaaattgctatcacttcactggaaaatggaggaaatgaaacaagactgttttagggggcctcctgtaggagatggactggcactcacgtaccagcccttcagagctgttacaccaaaggccttttacagctgatagctaaacctaacactaagtatgatctaaatatacaacacttcattgtacttctattacagtatgcaaatacaaataaagttaccacaaattggcgaacaattaatgagattcattgcagggatatttcatcactgaatgctgttttcctgccaactgagacatgatgtatttaattctaaatgacaccacctgctcccacctctaagtgaaatgaaaaagctgccaaagggcatgttgggaattaacttgcaggcttccttttaatcaggcatttctccataacactgaaagccaaaaacataacataatgaaaaataacacagctttgtaagtcaatagttgaatttggagtgcttgtcaaataaaagaaacttgggatacatagcatgatattccacacaatagtattcttttcttgctgtgaaattactttcttactctaaagcaggaaaaaagaaaaaaaatacaattttatctgacatgacaaatcaataagaagtgacttataagggagaaaactgaagggaatgttttcatttgtcatagttaccatgataatgacactgtgaacttaaagagtgtcttttatttgagaatctgaaagtgcttcccaacccttaattcataatgttgcaatatacccccagtgaagtattaacatgctgtattgcacattttcctaataggtaagatgagttagtgtatggacaggtattttataaagaaccttacaaagcttttcttgaagcttttatctcttgattttcagtcctctctcctgagcaactgaactgctactcaatgtgatcagttgagggtagaggagggcttacgcagttgctttatgccaatttcttatctcaggagtctgtcaaatraggatccacttcagaaataatcaagttgccaaggacaatcttggtactagaaaatatataattctcccaaattattttcccattaagtcttctgctaatccccaggagtctcaaagtgacaccctaattaaaatgtgaagtcaaaatcacatttgaattaaatttgtaaaataattttgagggatgctaagccaaaacaaaaagattcctatttaattcattccacaatcattcattcacctaaaacatttttctgaatacgctttatatgtcaggtcctaggtactaggaataggtcagtgaacaagatggcaaaatccttgccctcatagggttcacattctgatgcactgataagaaataaatgaataaatggtaaagttccaggaaggacaaaaaaaacagattaagagaatggagtaggctcttctacataattagttagagaaggtttcttcaaggagaagaatacaggtctatatgaggaaagggagggaacccagcatacatcatttacactgcatgcctttccctcctgcctgctcaaggactttgctcctgccgatatccccgatcattatttactccactttctactttttttccccactagtttacaaatacgctctaaagtcttccagcctaaaaaaaaataacaccctcctttgacctaacatctcctctaaaagtcattactttcatctacttccctttacagccaaactcttcgaaatagatgttcacactcaaagttttattttcctttcatttgttcttgaaccctcactaagctgggtttgagcttcacaacaaggaagtacctcctaagggtcatcaatgaccttcagattgacaattaattctcagtccacatcttataatagcacgtgatgcagtggatttaagctaatgtaaatacttgcttttcttggcttctagaacaccactctcttagtagcactggctacttatctcagtctttttggatgactccttttcatcttcctgagcctgaacattgaagtgctccagggctctgtccttggaccttcttttctttacttatactcactctgcctcatccagctccgtgctttcaaacagacaagtggcttccaaatacatctgtagcatagaaccctctttaatcatatatccaactgtttatttgacatctccacttagtcgtcttatagatatcacaaatacaacaatgccaaaatcgaattaattttgcgctccgatgcacacctgctattctcacagccttccccatgatggtggattgtgtagtccaaagagggctgccacaatatttcccatcttgcttgctcttcttgcaatgtgaccttgacatgtctcccatcaaatggtagtacatctgtttcctatccttgattccgtgtgaacctttgtgactgtctcattccatagagaatagtggaagtaaagttatgtgatgtctaagactagatcatgaaaatgcaattcyaattggctctcttgggtcagtcagtcttggaacttagctgctgtgctgtgtggaagtccaaactcacttgcctggaaagacgacctggggaagctgtgtgtaggtgttccagctgacaaactagctgaagtcctaactaaaagcaaacatcaattgccagacatgtgaatgaagacacttccagataattccagtctctcaccactgagtgaaccccaggctttgggtcttcccaaccaaggctttagatattgtcgaatagagggaacagacaagatgcccctgctgtgtcccatttgaatttctaacctatcaaacatgtgagtaaaataacatggctgttttatgacactaagtttgttatgatgatggtaaatggaacagatttaccagttgctcagaacaacttgtactcatctttagcttctccctgtttctcatacccaccttaaatctgttagcaaaccctatgaagtccagctctttctttgaaatacatccaggatcctacgacttcataccatyatatcttttgtctggactattgcagtagcctcttagccttcatgttttyaccttccctcccttattgtctactctcaacacaatagaaagagtmcttctctaaaagtataaatcagttatgtcacttcaatgctcaaaactgtccaatggcttcctttatgatatagattaaaagcttaagtccttaatggcctagaaggcccttcatcctctgagcctccaccacctcactgaccttatttcctaccgtcctccctgcctgacatgttacatcctaggcatactggtgcccttgctcttccctaaaaacacctggcacactcatacctcagggcctttgcattttctattccttctccctggaatgtacttaccccaaatatttatgtggccactctttcatttcctccaggcttctactcatgagtcactttgttaggtattctctaaacactttccataaagtagcacatcttatgcccatggatcttattcttctaattttgacttaccattacctgagtccttatacatttgttaatttatgttctgtcatcctcctgtaggatgaaagcttgctaaggatataaactttgtcttgttgaaagctctagtcactgggcctacagtagtctctagtgcatagctccataaatattccttattgttaaaggccatacaagcagaggggagaacaagtagaaagggctgaaacagaaaccagcctgacttgcttgagaaacagtataactgggacagaatgaaaatgggggagagtgtatgtgacaaggtcacagaggtagccaaaggttggatcatgtaggtcttcagaggctaaggcaaagactgatggaaagaaactgaagggcatttgatgtgatctgagtggcatttttaaaagattattctggattttctgtggataattgtctatatgaagagcaagagaggaagaagcatcaaggggaccagtccagaggcttttgcagtaattcagacaaacaagagatcatggtggcttgaactgcaatggtaatgacagaggtacctaaggtggtcagatacaggatgtatctacttttcaacgtagagctgaacagacatgatagcttggttataagacaatgagagtaatcaaggatgggttccagatttttggcctgagcaaatggttaaacagtggtacagtggggccacttyggagtaggtttactttaaacaagggtcctattttaatatgatgaattcagagccggcaagcaagtcccagagcaatgttcaattgtactatggtttagtcaaactaaagttccaaaattcagtgagtaaattctttgattctcagaatgtctgggcactgaacacagtagctgaatttgaataaaaatatgcaaagagaccaataatgacacctcacataagaaatacctatgtgtgccactgtcttggagaagcacccctgacacctgcacatacagatggcctaactgggcaccctgaaaactgacagacttggtatttggcaggtgaaccatcaagaaaattccataaacacaaacttctgcccatgaaaacatagctcttcataacatttacagatactggggggaaaaaatcacactaaaaatcacagtgaaaggctaaacaccaccactcaagtaaagaatgaagtacttgcatgcctttctcccaacatgcacataatagaaaaagaatttgtaagacagttgatgactaggatcattatggaatgtaaaataatgaaacattgtaagtatagctcttagggagcagcctttaaaatgggttccactggcttggtgctatccaagcagaaaaggcaagcttacctgactatctctactcttccataagccaataaccctttaaacatatttgtcactcagtctctttaaaatattttgccagggatttttcttaccctctcccctaagggcagaaatgagaactattactgtgttatctttaatgataattattctgacatacatatattttaacatatgaatcctttagattttatcctacccatttttgagattttcagggaccagtaagcaaaacaatattcctctttctctcctaatttggaaccaactgtgtgatggataaataaaagatcaaaatgccagctttattactaataaagttgatcaaagaacatgactcagaggtaccaccacagtaagccccctaataccttctaatactcctgaatttaacaattgccagatgctctctgagaggagaccctagcctgaaagctcactgaatacagaagcagagaatgtgtccagcagacaggagccagaaggatgatctgagcaccatcatttccttctctgaaactcaactatcagagaagtcactcctcytgccctggaaagggcaaatgatgaggtggagagaagcaggggcatgtcttcctcacatggttttccctcctggagagcagagtagaaatgatctccctctatgagaacatggagttgagaataaatattcttgcatcttrcccttcaaagttgggcaagggaactaattttatctacagtcagagaactggatttctacctatcatctatgtacacttcattttttcattattccttatawacatgaatgaggtagctggtggctattgggcacagagagaggcagacaggtttgacacgtgcaccctctacccttagcttgttgaatttagctaataatctaacttctcagaatctaattttcttacatgaaaagggattatacatacttacctcctagggttagaattaaatggaaataaatgtgaaaggactggcatacaggtactgaattgataccatttttttcccttctctaagtcttattcagtactagtttagaaattaaaatctgtattaaatcaaaccctgtaagttttttccagaccctgccacttggttgatctcttgatagtcactgagactaaacatccrgcttttctggcctttaaaaaaattttttaagtagactttattttttaagcagctttgggttctcagtagaattggacagaaaacacagagaattctcatatacttcgatctcccccacagtacagtttctcccactaacaatgtctttcacgctgcttgcactgcagtggtacattgattattcttccatgaaccttttctgacacatcattatctcccaaagtccacagtttacaaaaaaaggtcactcttaatgttgtacattctaggggtacattctattgacacacatacaatgaatgacatgtatccaccattatagtatcatacagaggagttttggtgccttaaagatcctctgtgctccacctagtcatctccccctcccccagcccctggcaaccatacaatkaaatcttattcagccttaaaaaagaatgtcctgccacttgcagcaacatggataaaactggggggcattgtgctatacgaaataagccagacacagaaagaaggagactgcatgatctcacttacacatggaatctaaaaaagttgaatacatagaaacagagagaagaatggtggttactggggtgggcagttggggaaatggggagaaactggtcaaaatgtatccagaaatcacccctgaagaacttatccagctgagcgtgatggctcacacctgtaatcccagcactttgggaggccgaagtgggtggatcacttgaggccgggaggtacaaaccagcctgcccaacatggtgaaactccgtctctactaaaaacctccaaattatcctggtgtggtggcatgcccctgtaatcccagctacttgggaggctgaggcacgagaatggcttgaatctaggaggtgggggttacagtgagccgagtccacaccactgcactctagcctgggcaacagagcaagactctgtctcaamacaaacaaacaaacaaacaaacaaacaaaacaacttaaaagaagttatccatgtaaccaaacaccatctcatccccaaaaccctattgaaataaaaataataaaaattttaaattaatttgaactaaaagaaatcaacaaaaatgcacaatgccacagtaataaaaacttgtatcttctctagaacaaaaaaaaagtataaagctgcagttatgtagaatgagtaagtctagagatgtaatgtatagcatgatacagttaataatccagtgctgtatactggaaatttgctgagagagtagattttaggtgttctcaccacatacatgcttaaaaataattactatgtaaggagatggatatgttaattagttatcattcactgtgtatatgcatatcaaaacatcacgttttataccttaattattaaaaaatttatataaaaactttaaatgcatatatacagatggcaaataagcacatgaaaaggtgtccaacatgatatgtcatcagggaattggaaatgaaaacaagttaccactacataactattggaatagcaaaaagctgacaactcaaaatgctggaaaggatgtaaagcaataggaagtttcattcattgctggtagaaatgcaaaatggcacggccactttggaagacaatttggcagtttctttcaaaactaaacatactcttgctrtatgatccagcaatggtgctccttggtatctaacgaaatgaactgaaaacttatgtccacaccaaaaccagcacatagatatttatagcagctttatttatagttgctaaaacatgaaagtagccaagacgtccttgagcagatgaatagatttagtaaactgtggtacatacatacaatgaaatgttactcagcactaaaaagaaatgaaatttcaagccatagaaagacatagagaaaccttaatattactaagtgaaggaagccagtctgaaaaggctatctactgtatgattccaactatatgacattctggatatacacaaaactacggagacagttttgttttagtgccgattaaagattccttaaaaaaatgtatcttccattattatcaaatggtacttaaatgcgatcatcatatattcctatttttgagttaagacatttaggatattaagcttggaaaaaaccaataagacaaaacatcatcacaaaacaaaatccccagcctcctagggattctaccacagtatatgactattgctattatcaccttggaagaaagtttccaggtttacttagaagaaaataaggaaagtgtaagaatgttttgattatgagatgaagaccccgtagaatcatacatatgagttaaaagaaacttttagctccaaccccttcattaaatataaataaataacgaatacatatattcattaataataatgaattaattaataaataatgactagatatatacacacacatacagggaaactaagacaaagaatacctaaatgacttgcccacagttttacatttagttagcaattgggcctggtccagtctttgacttctggctcactgctctttcctctggttcagatacatggagggaaacagatggggagatgcagtgaagactctgggcagtcagggtgatttaagacaccaggtgctttccaaacaaagagaataagaaaagggacaaaagtggctggaacatgttgaagacaaacattgcaaattttatgatggagccccaaatgaaatatgctttaagattatggctgagttcctgagttttctatttggaccccagccttgctttttttactggccactaccaaaccwagctagtaggttttcctagctgttgactcagtatttgtcacatgattacagattctcctacttagtgatgattaaaagtctaaagcaagattggtgttttaaaaaaatcagtatcctatcatggtttaaatataaagtattgagcaagtgggccagaaacaagcaagggactttctttcctatatcagtaataataaacattgtcataaaattgaagttacatcctctcttgagggcaagatactgtgctgacagtgctttttacttaacagccctaacaaccaacycaagcataagcatagcagccataaagaaacatctgctgaaccagaaatgtagagacaaatgaaatttgtgacaaaaagagaagatggcactggatgcacagtcaatctgggattcaggtccatatcctgctttttaaccccagagctgatgccttgtacaactgaaccagggaatcacactaagatttttgtcatacatctgggaactgaatagaaatcaatcaacatttagaaaccagctactaaatcccaggctctgggatacagagaaggagaaagcaactttcttacccccaaggagagcattatacaaagcaatgcttgccttgcagtaggacagagatagatggtgatatggtttggctgtgtccccacccaaatctgatcttgaattgtagttcccataatctccacgtgttgggagaaggacgtggtggaaggtaattgaatcatcagggcggttactctcatgctcttcttgtgatagtgagtgagttctcacgaaatctgatggttttataaggggccttcccctttcactctcatttcttcctgctgccaccatgtgaagaaggatgtgtttgtttctccttccaccatgattataagcttccggaggcctcccagccatgctaaactatgagtcaattacacctctttcctttataaattacccagtcttgggcatgtctttattagcagcatgagaaagaactaatacagatggacttagaactcatccagtgctccacctggatgccaagcttcagagaggtaaagcactgtagagaggtaaagaaatgagttcaaggcagaaatagaactctatcttcttgcttcctcgcccagtgccctttccaacacaacaattcaaaatggtatgttattttactatcttttcttgtcttcattattcaaaatctttgtttctgacttttagaaagagattttctaacaaaaactctccagttaaatattattggaccaagttctcatcctatggtaacttaaaacacaatctcaatttctttcaaatactaagaatatacactatattatgttatttcatagactacttttctggaatatagtttttcctttttggaagaggaaacagtttaagctagataaggaagaactcagatttcacataccaacaaaaatctttgtattacaacccacagctctgcttacctagaaagcaagacctgcaagatcacaggtgaaaagatagggttccttctttcaatacttggttaattaaccaaggatatctacaaggtgttagccgaacactccagaaaatatcacatttacaatgcatacaaagtatagctaaatgcctttgcctacattagccagccatttattgcttattgcgacctcagcaagtattgagttgattcattgtaagcctctggtttgtagagcaaaggcagcaaaaagtaaatcagaactccccacttccaagaagagtgccagtttcattttcctgactacctatgagtaaacaactcctatgtaagtactaaaatgcaggatctatggaactttgattctcaatttaaaaggtaaagagcaaggtgatctttcatgatccttttcctcaggaagcaacagttctgtctttgcttctgtctcagaaaataaaaaaaaaatgctatgaaatttaaattattattaccttatttcacaaactgaaagtctaagtgaaataaaaatcctgaatgaaacatttcaccccatttgactcctcatcaaaattacacagtagaacatatgtgtagtagaggagctttaaggaagaaataatattggttttaagtgtctacstttattcaagaataaattattaatggaaaaaagttttaatttttaggttgaattaaagcatgctttcaatatcatcttcccttctccctgatgtaattaaccaattcagcagataaaattcatcttatgttgaaacatgcatttaaatgaagtctgaaaaataattaactaagagaagaggcaattagacaacacgtttctgttgtgccacagcaagttcgtgcttgtaagtgtgagcacactgggtactagtataagaatatctgccattctaaatacctatattattcactgggaactgattactttattcacatgctatttattggttccctgctatatggaagacactgctagtccctagaggagagttgaaaagttataaactaatccctgatatcctagaagttgaaatctgctaacagaaagaaaacacatgaaggatcgcagtgcatgacagtataaaataagtgtcatgtcagcatcaagaagtgataaataacctaaaaatcagttgttttgaaatggatcttgcattgtgcccatgaaaaattaaatgatgtagaagaaggatttgaagaataactattctgcctgataataacagaagggcaaacaatggttattaacacaaaagaaatgccaaagtataagaaaaggtacgagatgtgcaattaatcacaaagccataagaatcttacagcggtcatatagtttatatataacttttatttatcaaaatataaaatattttcttctttgtgattctaatcacactaggacacaattacaggaaaaaaaagaaaagcacaaaatattaaaatctaggcactgtgattaactaattcaaacagataaaattcatcttatttcaaaacattcaaataaatgaagtttcaaaaataatcaactaagagaagaggcaatcatacaacacatttccgaggaacatttactatgtgcttggcatcatgaaaggcacaaagaagaaatcagaagggaagctttttgaaggaagagaatatacctcattcacaattttatccacagtgcccatactacctgactcataggagatcatcaactaatatttttaaagagataaacttagacggatgaatgattgaataaacaaatgaaggagagaatctctaacttttggcattcatattagtaacatattcattctagttctagaaaaacgttataccaatttgtaatagaaaattgagattaatgctagaaaactaaatttaaagccaaataggaagaaagcgggggtggaggggaatactaagatctgaggaaagatggtgacttcaattgaacattatatttatttctgagttttctactagttaaggaaaaagagaagcaattactttttcagttcttattatctgattaaagggaaacatctccacaaacagacgttttttatctggaagtataagagaaatttacatatagaaacatacatataaaaatttatatataaggaactctgtgattaatgggcaatgacatcaatagcctcttgcagataatatagaaaggcttttcatgtggtcctttgttttgctgacttttgataaaaactaaaacaatggtaatacgctgtaactcaaataaggcattttatgtcagttaagcttgttgttttctagtgatttaccgaattataaataaattttgaaaaaaatgtaaaggaataagtgaacactgccaatctcaaataccagttatctccctttgatactattagcccgagctgggtagtagtcaacttaacattgaggtctttacaaagaatgcctagagtatggactccttcgcctgctaactgcatgcttaccatatgtatatctagaagcttagaaccaaaaactgaagaattaaatttgagggtgctaaaaccagtttttgaaagggtgactccttcactaaaaccaagtgaaaggggactttaaattgaagaaaaattaaatgaatgatgtgccttttttctgaaactcaagtcaggacatatttgtagactaattgactgagtatattataaaatgaatttagattgtaaagttgtttttaaaagaaagaggataaaattatcttctatttttatatcattgaatttgtttttggaagcatgtcatgtaatatatagattaccacatcctttgcatttaacatatgattgcccaaatactttagtaaagggaaacatactggagtcacatttactcgaggaactacagtatataatttctggaagaaaagatcaaagatgacaatttatcatttttatttaccgctagtcattttatttctcaaataaagacggaaaatgttcagtggtagccttttcaggcaaagtcaagacagcctaggccaagcagatgggtgattcactggcaatatcgatggttttgtctgaattacgaattccactggttgaggctttgcttcagttcacccatagagtctctaacataaccagctttgcagtgatgtaggcctgtccagctctactgtaaatcactccatgacaatgagggtgaattctgaaattcatttccataaatgttccctgaagtggtaccataaattttaacacaaaattgaccttaaagatttgctaaaatattaaatgcatgtgtaaaatatttattaatcttttcttcattatttcaaagtcattctgttcaaatggaattcatgcacttgaaagaagaattgatagcttttttaatctttttcatttataaatttctagtttgttgttgctgtacattctataaacaaaatatttaactaatagagaagatcattaggaagtgtgagaaagtatcaagagggaagtctgcaggaatagatacaacaattggagtattagaaatactttgagaatgaatgacaatacagagagcaaattatcaagctcccctcccgcccaaagctgaatggcatgtccatctcatttaatgatgtatgtcttctgttataagctaattttcagggttttccatgaatctgcagagaatttttgaatggccaagaaaagagaacaaaaccagaaaatatgcagatacacattaaacaacaaaaggatcacatcaataaacattcatgaagtgcttccctatgtgcacacctgccaactctttgagaagttataagaagaaggaatcatagtttcttcccaaaaagttaatatgctggtttgaatgaaaatatatggatgtagataacactattttttccttataacaaattttccttaagatgatgcttttacaaatatattatcacagcatttttattcattgtggcaaaggacatkcgcacattttcttgaaaacagtgacaggttagcatcatttgaccctatccaggttactattttaaggttcatatacctagatatataatagacaatcataacttctttacagggtacatttggtaagggcagatgccaataatgtaggatgaagaagtggctccaagatgagtctactctattccacaagtcttagtcagatatctcataaatgggggccactgttcacaatgggtaccttcatcagaaatgtggatcaggcactaaaaacaaaaaaattaaaaaccctaatcaaatcaaacaaaccaaagcacatgacttacagcccatggtttagtagattcatttttatacatggatggcagcatactgttatctgtgattgtttttaactcatgactgctgtacatagttgaaaatgtttctacacctcagtttccaccagctttctaggtctgactggaaagccaaaactactcatatgctctaatatagagcctgcacctgctatctgttatttacttagctgctgtagttgtccctttagaggcatgttgctgtttgaatctaatattttgctcaaattgagccttcccatatactgcttgtctaaattttatttgaacttcccataataaaaacaaaagtatgctctctagacctctgtctcgaaactagattttccaaatatgtgcttgacttatactttcctttggtcattgttcttatgagaactaactcagttgactgagacactgaacaataaggattgccagaaaactataaacagtgatgccatataataatatcctaaaagatgggtaagaggaacattgacattcctatttatgctgwtacaattctagctagaattgggaattgataggtttaagaatgtgaaatcaacttcactcttcaatcatttcagttgtgaaccctctgatactgaaaaaggaagtaggtcatggttagtcattcacagagagagtcctaacagggacataaatggaaaatactgaggtcctgtacacaggcactggtaaggtatgaattcccactgctggcacaacagaattgtcgaggtctggaacatggggtaacagatattgggttgggtgacacagcttgctgagttgtaggattattgccttgtatgcctatctctgtgctgacagctatgggaggtaggtggtaggagaagcagcaaactcacagttttaggatcctcctatttaacagagatatctcattccatatgacagtgaagatcaccaaaccttaggtatgtctccatgaaatacatggagcccggggcatacacctgtaccctttacaacatatattctttgctgtgttatgaatgaaccagaatagaagcaaatttgaactaaatccaagtcattgatcttggtcatctttgaatatagataagaatccttggtctaccctagcagaaatagaaattatgacaattaaaaggaagcttacattattaaaaatcctcttctgaattttcatgaaattagaggtcctgaggttaacctggtggtatggattrtatttcaaaaggaatttttcttttaaagacagtgtgtatgtgtgtatgtgtgtatgtgtgtgtgtgtgtgtgtgtgtgtgtgtgtgtgtgtgcctgtgtctgtgttggtaagtacagctctatattctttttttaattatatttttccctacattgttaggtggcatttttttgtttacgtcaaattaatatcctataccattattattttgtaattttatttataaatgtactataaaatacttagactatgaagaactcatgttcttaggaaaataagcattcaaatattgagaaatatataataaaatcataagatacggtcttctattcagaatatgtattattagcgtcttctttgttatgggccataaaaaccattaactataataggttctttcagtcagtaagtatttattgaacatctgctctctttaargcacaactataagaaccacgagaatataacagagtcaaaaaacaaagtcctgaccctgaggaacctgtgcagaggatgaagcaagaagatacatacggaaggctggtggagaaattacaaggcattatgggcacatagtgcaatggttcagtactcatttctgggccggttatctgtttaaggataactctaggtgtggtccctgccctcagggagctaacagtctagaaggataaacacaaataaatggccattttcaataccacttgatgttaaaatagaaatatgcaaaagaagtagagattataaacacaattactagaagtctgtccagatcagctccatagtggttttatggagaatgcctattgaaatagatgagtttgtgtcttagccttraaggatgtataggattaggataggtaaaaagagcagtaatggaggggcatattaggtagtgggaacaaaatggacataatctctgagataggaatgaatagtaggagctgtgtaggggatggtgaggatcagatagaccaaagaagagagggttaggaagcagctgtgaggtatgagttgcagagcttagagacagccagttgatgtccactttgaatatcatcaaactgcagaacctggactcaatttgatctgccatagagagacactgagtgtggaatcattactgttgcagtatggggtctctggaaaggcagactctgaaacagaatttagtgtttaagatgtttatagagagtaggaatcaatgggatcaatgtgtacacagggagaaggagaaaggagaatgaggctgagagggaagtcagttgacaccactaggaggtctrccactgaaaggggctggaagaatgtcttgggttggggtcttcctacctctgctgtggttagtcattggatggggggagctccagaaatgggagtgaccttggaccaggcagctccctgtagccaagggcaagtcctgatgggctgacaggctatcccctgggagcactcccagcaattgggagaagtcattccttgaaggaacacctggggagtcagagttaccagtagttttcaaagtatggtcctggaaccatcagtatctcaacacttggggacttgttagacatgcaaattatcttgccccacctaagacctggtgaattacaaagtctgggggtggggccatgcaggaatctgtttacctagtcttcttggtgattatgatataagctgaagtttaagaacaactggtaaaatgggtacttgaaagatgagaatgagtttatgatcactgagtaaattaaggaagtgcaaaaagccttgtttgccaatactctacatctaacttcttaattgtgctgctttgaaaccacatgtaaacactctaaaaagaaatgaaataggggatgtcctctttgtttattatcatctccaaacacccaggatttgggtggtaaacactgtgtttctgatcttggtattagaaacatagtatttatttaaatgctagatccttctttcatgccaattactatctccagatgaaaaattctgtgtggcattcctaaaagaacctcctatacaccaaatatttgcatggcaaaagttcatatcataatgtacttttgtacttttggctgtaggttgttctgtgtccctgaagcaaaactttattacatggaagtctttggagtctaaaagagtagtgattcacctatcacttgtgggattgactaaaaccaatcagaaggcagggtgttctggaactctggtttctaatgcacaccgagtcctgtggcacactactagctgtcccctcaatgcattctcctagtcttgctgggcacacagcagctcagctagggactacatttyccagacttccttgcagtgtgaggtggacacctaagtttgggtcaataggatgtgcgaaaagtgaggaatgcaatttctagttattttcaacttaaagacaatcagctttccccggacttcctcccaaacccactccccgctggggctggaataccaaagtagcagcaatccagcttcggccatgctaatgaggactacttacaggatggaagaaaaacatgtaaggaacttgtgtctctgaatgatctaaaggttcagggctaccctgcagtctaagccagaatgttaggtaagagagaaacaaacctctaacatttttgtttcagcgctttacattagcttaaacatttatagmcagctaggttacaggaaaactcctgaaattaaataaggaaataaaatcaccagtgatgtccttcacgatactgaactgcctggaaaaaattgactttaatattaccatagatgctacattgaattatttcttaatcttgaacaaagtacgaagaagtcacaccagttttaaaaggtagatgagtgactcaaaagtcctactgaataaataaacaaaggtgctcaagaagtgtttcatctattactgatatarcataaattaacatttaatagaaacttaaatttttaagaacaaactttaccagtctgaaaatggtaactattgttccacagtacaagtcagtgctagaaggtaagctccaggagggtaatgaattatggcttatttattgttaaattaacagaacctagaaaaaattcctggaataaaataggcatggagtaaagctgtagaatgaacgaataatacaatctctttcatggtccaacatccatgcataatctgaacagatatatactaatacagaattgaaagatttgcacctatctttaaatacgttaaatcttcttaaaaataaaccaccattaagtcattttttaaaataacattaaaaaattctatgatcctataattaaaattttgctattacactaactgattaaattcaagatttatgagcaattgtgtcaaggaaaaaatataaactctcaggcctattaagaaaaatgtaatagaatcataaaattgtattatatcacagccaaataaacacagtaaatcctcttctaacaatgcagtaacattggccttacaatcttgacttgtcttatacatggcttttactttgcataattgtgttttagagatattttgaaacttttctaaaacctaatgacgtggtataatgcttggggtataatgctataccccaagcacacaatttatacaaggtagaaaaatcaaaaagactttatatttggcattatctagtctattttcagtgaagagttaactcctctagttagaccaacccttgctaaagtgggggaagccattcattcaataaatcaataagtggaccagttatctttgttccattcttaggccaaagactgcactcttaattaggaatccttgttattgatcacagagggaacctggtgagtaataagatggatagctaaatccatgaaattactagaaaaatcagtacaaaacctatttattgcatgtatttaaagcaacgagctcaaatgtcagcggaagtccaagagagttggttcatgttctggctctgaagttcttttctgcataattttgggtgactcactttagacttcattgtaccataatttttcaatatgttcaatgcagatattatttggcatccatttaactcatggaaacattaatagattaacatgataaaatgtcttgaaataaagtaaagggctattgaaggaagatatgctatggatccaagatagcattaaactgattatttgagaggaattatccatagtttcaaaagtattccatatcttattccctattatcttgcactttaacagataatcttctttcctatatgttaagcatgaaaattcttaacaatcttcaaagggaaaaattcccacaaaacccaaaaaatagttggtctcaaaaaaatgaaaccaactaaagggatactgcacactaaaaaggcaattaaaatgataaaatatttctgtgctcagatctatggctgccaaatttctggtcaacttctcaatttagaaatatgatccaatttaaatgctttctttttttaaatccccctttgaaattttctggcatagtcagaaaaggtgatatgaaagatgagaaaaatcttaattatgtcagaaagtacaaaggactcttagaaagtaaaaagcatttgaaaaacagttaaatatttccttaggatgaaatagccaaatgacccgactgtggtttgaggaggtttaatatgtttcaggataggtgtaaatcctttaatattacctttgtatatgtctgttctgattatccatggatgttggaccataatgaccaatctatgctaagtagtcagtccccatctctgtatcaattcttggtcactgtttaagagacttgttctggctcttagttttaaaatcttactagaagataggttaaaacctaatatgctctaattttctacattccttgtatgtgcttactctggtttctcctctatgsgaagctttattcttcaagcctattcttctagtccctatggagtctaccccattttaaagctgatagagttagctcctttcggtcaaatacagtatgttcattcttattctcaacccaggaggacatttctttggccattaaaaaacctagtttgaaagcgtgtctgaattttctgatgtgtgttaaaaaatacaaacaagaaatctcattgtgcttgtatccatctccaacctgaacaaaacaagtgacaaatcatccctcttcctaaccacttcccttcatttgtaccttttctctagtcacccaaacacaaagtctaattttaaccaagtaaatatttgataatttcagataaattacttaagactcctatgaaagcaactgatattcccaaagcattaatttttaaaaaaaatttaaataaatatacatgaagacatatataattgtgtacaaacaggttggaagaaaatgattacaactttttgtaaagaagtctttaaatctatccttttaaatacaacttcattagtgttatagttatttaaggtatcctaccaaggaaacagaaaattttcaattctgtatgcaaatcttgtcatcctcacaaaaactggcccccagctaaaccactgactcttggactgtcccttgaaccagatacaagtcagaagaaatcagtataacttctgccctagttgatgacagaaattggcttaatatctgtgtgttatgattacaatggtttctagagctacacacagcctgaaggtttttaagaaaaagttacaaatgagtttgctaaaatattctcaaagttttaaaattttaccttaaaaaaagattgccatggaaggaaagtacatgggaaaatattagtttttcactttaataattacatttagtaattacatttcaataattacatttcaatactcagtgtctgcttaaaatacatattcaaataaagataaaagctatctcaggacatggtaaggactgtaaaattcaacttaaatgcattctgttaaggataatttcatttttactttgtkccaataccctagcccacacctaggaatttggcttggtggtagtaggcagtataaagcagagcagccaccatgcgctaacaatctcagtacatctgctgtcatccaacatttcaaatcttcagtctgcaattataataggagaagggaatcaagagtttmtttattttgggcagccctttatgaatgaatgcagtcactaaaaggctaattgtgtcttctgagctattaattgacttagctccaggagtactgtataaaacatatggcacaagatccaagcaactgtccagggctgtgcacagggggcatttggcttctctttgaaaagaagaaccgaaggtaatccctttgcagctgcagtgcagatggttttctttacaccatttcactgaatactaaacagaaactggaaaaagtttggaaacataataaacaaacagctgagtgttagcttaaatgctctctgcatctatcagagggaagcattcagaatctctggatgtttaccagatagtttaaaggaaacatagagacgtgaaaactggatgaaatgattttgaaattgtacctaaatatggttctatgtggttttcgtcaaagcaacaatataattaaatctctctgaaacttcagttatgggtgtcatgattcataatcctcgacatcataaaaagtttaggtttcctcggaaatatgctgaaatggataaagctaaaatcacccttcctataggagttacttgaaaatcaccgttaaccttcattcttcttccttaatgtggcaacctaaaaccctgtcatctttcccaaataaaaatgcacagtgaagctcaattaccgtttcaacttcacatcatttttctacactggcagaaagaaaccatcaaataagagcctggttggtgggcaggcaaaaagcaaagtcatatcaatgaagagatttggcctgttaatattcagtaggtaataaataataatgtatttagctcactgaagaagactaagatattaatactaaaaacaaatcaggtaaatactaaaaacaaatactcttagacattgggattgcagtagtaacaaaatacctgtcatgcctatcaacatatatacattattttatatatagcaagaaagaccaaaatattagcctttttagttctaattatgaataagattatgaaaaagattatgactagtatttatggataacttgctttaactttttttggtcaggtgccaatccagatttttcctaaataaacatatattgtattatctttataaagaaaagttacctaaaagactatgttacatactgtattaataacaaacgggccagaccaaaaggtaatattactttatgtaaaatacattatgaactagataaatataataatttctttatgttttctcaaatctcctagaaaatagtgttaaaatgaagttcttcaaaacctgaaataaacaattactacatttctctaacagggcaactatctgtttcatcagttggatacttcatgagttttaaacaacaaagcaattcattaggcaaaatatattctgaagccctactatccaatgacaccaaaccgaaaataatctaagaatataaaataaaaattactcctctttgccactgctcaccctttcccccattcttcagttccaaaagctttacatacactttggaaacagcagtagctttgcattatgaaaaacacgaaagacaaagcacaccaacgccaactctaagaggttggtggctggtgtaawggcttccttcctaaatgcctgccatctggagccggtgtcctcactattctgccttgccggcttccatctcgttcccaactctcagctggaaatgttttgcttatcccttgtttagtcctcttaatttctttcttctcacttgcttgatttcatttaacttggtgaaacagtacaatggctgcatttaattcatttatcaatattcagctaaaaaggactataagagaattcacatatggctgctgataccatttctggcccattgagtaaaaagactcttaacatttcaaattcttcagtgagaaaaattcagctataagtcactgaagaaatagttataatcagatagcatgtgttgctaaaggagctattatgttacccattccaaacatcttaatatactgggggcataagacccctttctggtatgtcagttattaaacagcctaagaaaagagctgaattgttgacatgagaatgaacatttaagctgcttgtcagtactctggttatggtaagaaccttaacccatttattcctgaggttgcaattttttgaatctttgccatcagaccttaagcagtaggatataaataactcccacatgcttagagttccgataatggaacactaggcatawatgggattaatgagcctcaaatatcctcagtggcagagtttgaagcttggggataaacagaccacagcctaattcagtttgaaagtgattaattataataaacaatacctgaatttgtgaagtagtttgtactgatatgttatttaagcctcaaatatgtgtttttcttcaaattaatacgactaaatatttgaaacttcaattatgggtgccatgacttgacatcataaaaagtttgtttccctgaaaatgtgctgagatgcgtaaagctgaaaccacttccatttctatcaggtcagcaacgtagaaccctgtgtacctaccctggggtgacaggagaggccatgttgaggatatgggggacagatgaaggctggggtgactgaaagattccccaggctctggcttctgataccagaccctatgtacttggatatttttgatttgyttgacatgtactcgrgtaatgaaaccagtgaaatttattagttttttttattggtttgacagtcatttttcttaaggaaaaaaataaatattattgctttttagcaattttctctatttttataacactgtaaaatattttcctcatacagtggagaagcacaaggcttaattgtttaaaaatcrccaattctagaatgaccttagtgactcataaagaagatatcacagaaaatcctaaaaatcaaatctatgaaggccttaatgccaagcattagcctggtgagaaatgtgataaaggttcatatattcataaacaaatataagggatggcaatttattataaatatcattctgggcttattcatcaatgcagctggaacaggtgaaggtaagtgtacaaacaactttcccttttctttttttatttttatccagacaatttttggcagaagtattggtttagcttctatagcaatttaattaaaattgaaatagtctgtgtattttttgtttaatttttaagctatggtaatttagagctattatatacagtaaagtgttatgcaaacattgtaaacaaatgaagacatccaagagagtattatcatggatatgtgctgtatttattgcctggcatctcgtaccctttctggaaacagcatcctggtttttcttcatgcaaccacccttccctagttgttagtccatgcagtttaagtagaattgactccacctctggcttaagaggggcccacctaataagagcatcctaaccctctggccacagtgattggctcagggacaggcatatgacctaagccattcaataagattcaagttagaactttgctgctacttctacctctattcttctccagggataatcactgatagcctgtttcatatgtactcgtccaaccttatttctctgacacatatatttggtgatggaataaacctatagatacatatatccacatatgtatatatacataaatgtacctatgtagtttctaaatagagtggtacaatataggaagtgaatctcttttactcagattatttacatctttccatttcagagcaacagatctgccctaaattcttaatctctgtattctaacaaatagagaaaataatttacaatctaatcaataggatgtcctataccatagcagactatgagggtagaaaaaccctagctgaagcaacagctcatttctgatcaccctctgcatcattatttggcacctcaggagtgacacaggagttagaaggagccagtgataaagggggagaaagtcctatggaagtggtgggcttaagaaaaatggagacagaaatgcagtataattcagaagagagaaacagtgtaatctgaaacaagtctcgctgctatcttctaggagctggcatcagaaggctttatttagcaggaggacaaggcatatgttggttctaatgaaaccaggctcaggctagacttggaattaagttacatatcctggatcaggattgggagtttgggactgaagtctcaattgtctcacagaagatggaggctggggtaaatgaagacrgagaagaagggaaaacttgtttcaaaatcatgaacattaactcataatgagaactcataatgagatcttattgtttgcaaagttactaagaacaggacactcatttcgtttttcatttatcctcacctaaaattccatgtatagatgatacttctttatgtatttctctcttcttaaaagaaaaaaaaaggcaaatcaagcaaatgccaagtctgtttttattaaaatatacatacattcacacaactggcattttcaagtggtactgcattttttatggcaactagtttgcttaataaaaactcctagaagacctgacacagcatgaagctgaattagagttacgaggaatcactttgcagtaaaatgttttcccctatattttaccactaacctcttttttcaggattaaggacattgtgaaaaagttgtcataaaatcaaaggatatagaatggaaagaggtacatgaagagtttttctaactttctaaatcatcttatttttatactttattcaataactaattctcattttaaactgaaactccctctcttattgaattcatttgagcaaaaattgaagtcaaactgtttttcctttttttatttggtccttttaacagaaaaaaattaccattttgcaacattacttcaggtctgttttgggtatgaaaattcttaattgtctgtgggttaagaattatttaaaaacataaagttaaaacatttctttctttttttttttttgagacagggtcttgctctgtcagccaggctacagtacagtggtgtgatcatagcacacagtggccctgatctcccaggctcaaaacatcctcccacttcagactcctgagtagctgggactacagacgcatgccaccacacctggcctattttttctaacacgcctggcctaaaatattgtttaatcaaagtcaggctaccagagggaatggtggaaggatgttaactgtagataaaaataagaaagctaagaagtataattatgaagagacagatcagaaattctaagcaaacacaccaggattttttttttttttactttctataaatactgtcctagactaatttaatatttattaactctactaaagtagttccatcacccaatttgtaaagtgcattttttgcctgagtttaaaatagaaagaacactttaaaattacaccaaaaggaaagaaattttactgtactgtttcctcagataaaataatttcatctcaactaatttcctggacagaaacgtattttccatacttaattcagaacacaggctatttttttaacgcttatgagtatattaactaaagacatcaattcccaatgaaacagagaacactcttgatttgattggcaggattgggctctctctgcttgtgaacatcagctagaaattgctacattaccattttactgtattgttttcaggagcagttctaaacgcatagtcaagcaacattccaaattccatccccagttttcctctctggagaatttttcttatgtcacaggaatggtgtataatgtttttataagcaattgccattttaaggtagcaaaatcattaactggggcctacttgaggttatcagtttttcctattttggaacctacataattttattatgactaaacaatagctgaagagcattgttctctatttactcctaagatgaaaatgtatatgaccttgaggaaatatcaaagtaaaaaaaaaaaaactatatagtaaaaaagcattatcagagtattaattattaataataggctaagaattaaaagagggagcatttatatctaaaaaaatcacaaaccaataaactgttttggctgttaagtatatgcttcatatttaccaggacaacctgatttctttttctttttttcttctatttcttttattttactttaagagaaatggacttactctatcgctcagagtagaattctttttcaacaaaaacaattggtcaagtacagatatatatatatatatatgtatatatataaaatttagctgtatgaaagtcatttctaataattgattgctcagaaagaaacctcattacaaattggtattttaagtataaaataaacttaagacagatgtgatcacaatacttaacttgttaatagaaatttgttatgatatttaatctatttcctcctcaatatgccagggaccatgtaggtttcaaaaatgaaacacatggtagttttcttttagaaacaaaatacaattgatacaatagcaagcctcgtaaaaccacactgaactacaacgtcttaactgtgagatgccgagagagggctctaggagtacaatataataaataagttcttccagtttttgcccattcagtatgatattggctgtgggtttgtcatagatagctcctattattttgagatatgtccaatcaatacctaatttattgagagtttttagcatgaagcgctgttgaattttgtcaaaggccttttctgcatctattgagataatcatgtggtttttgtctttggctctgtttatatgctggattacatttattgatttgcgtatgctgaaccagccttgcatcccagggatgaagcccacttgatcatggtggataagctttttgatgtgctgctggattcggtttgccagtattttattgaggatttttgcatcaatgttcatcaaggatattggtctaaaattctcttttttggttgtgtctctgccaggcattggtatcaggatgatgctggcctcataaaatgagttagggaggatttcctctttttctattgattggaatagtttcagaaggaatggtaccagctcctccttgtacctctggtagaattcggctgtgaatccatctggtcctggactttttttggttggtaagctattgattattgccacaatttcagagcctgttactggtctattcagagattcaacttcttcctggtttagtcttgggagggtgtatgtgtcgaggaatttatccatttcttctagattttctagtttatttgcgtagaagtgtttgtattattctctgatggtagttcgtatttctgtgggatcggtggtgatatcccctttatcattttttattccgtctatttgattcttctctcttttcttctttattagtcttgctagcggtctatcaattttcttgatcttttcaaaaaaccagctcctgcattaattaatttttgaagggttttttgtgtctctatttccttcagttctgctctgatcttagttatttcttgccttctgctagcttttgaatgtgtttgctcttgcttttccagttcttttaactgtgatgttagggtgtcaattttagatctttcctgctttctcttgggggcatttagtgctataaattttcctctacacattgctttgaatgtgtcccagagatactggtatgttgtgtttttgttctcattggtttcaaagaacatctttatttctgccttcatttcattatgtacccagtagtcattcaggagcaggttgttcagtttccatgtagttgagcggctttgagtgagattcttaatcctgagttctagtttgattgcactgtggtctgagagacagtttgttataatttctgttcttttacatttgctgaggagtgctttacttccaactatgtgttcaaatttggaataggtgtggtgtggtgctgagaagaatgtatattctgttgatttggggtggagagttctgtagatgtctattaggtctgcttggtgcagagctgagttcaattcctgggtatccttgttaactttctgtctcgttgatctgtctaatgttgacagcggggtgttaaagtctcccattattattgtgtgggagtctaagtctctttgtaggtctctaaggacttgctttatgaatctgggtgctcctgtattgggtgcatatacatttaggatagttagctcttcttgttgaattgatccctttaccattatgtaatggccttctttgtctcttttgatctttgttggtttaaagtctgttttatcagagactaggattgcaacccctgcctttttttgttttccatttgcttggtagatcttcctccatccttttattttgagcctatgtgtgtctctgcacgtgagatgggtttcctgaatatacgacactgatgggtcttgactctttatccaatttgccagactgcgtcttttaattggagcatttagcccatttacatttaaagttaatattgttatgtgtgactttggtcctgtcattatgatgttagctggttattttgctcattagttgatgcagtttcttcctagccttgatggtctttacattttggattcaacatagtgttagaagttctggccagggcaattaggcaggagaaggaaataaagggtattcaattaggaaaagaggaagtctaattgtccctgtttgcagatgacatgattgcatatccmgaaaaccccattgtctcagcccaaaatctccttaagctgataagcaacttcagcaaagtctcaggatacaaaatcaatgtaccaaaatcacgagcattcttatacaccaataacagacaaacagagagccaaatcatgagtgaactcccattcacaattgcttcaaagagaataaaatacctaggaatccaacttacaagggatgtgaaggacctcttcaaggagaactamaaaccactgctcaatgaaataaaagaggatacaaacacatggaagaacattccatgctcacgggtaggaagaatcaatattgtgaaaatggccatactgcccaaggtaatttatagattccatgccatccccgtcaagctaccaatgactttcttcacagaattggaaaaaactactttaaagttcatatggaaccaaaaaagagcccgcatagccaagtcaatcctaacccaaaagaacaaagccggaagcatcatgctacctgacttcaaactatactacgaggctacagtaaccaaaacagcatggtactggtaccaaaacaaagatatagatcaatggaacagaacagagacctcagaaataacgccgcatatctacaaccatctgatctttgacaaacctgacaaaaataagcaatggggaatggatttcctatttaataaatggtgctgcgaaaactggctagctgtatgtagaaagctgaaactggatcccttccttacaccttatacaaaaattaattcaagatgggttaaagacttacatgttagacctaaaaccataaaaaccctagaagaaaacctaggcattaccattcaggacataggcatgggcaaggacttcatgtctaaaacaccaaaagcaatggcaacaaaagccaaaattgacaaatgggatctaattaaactaaagagtttctgcacagcaaaagaaactaccatcagagtgaacaggcaacctacaaaatgggagaaaattttcgcaacctactcatctgacaaagggctaatatccagaatctacaatgaactcaaacaaatttacaagaaaaaaacaaacaaccccatcaacaagtgggcgaaggatatgaacacacaattctcaaaagaagacatttatgcagccaacagacacatgaaaaaatgctcatcatcactggccatcagagaaatgcaaatcaaaaccacaatgagataccatctcacatcagttagaatggcgatcattaaaaagtcaggaaacaacaggtgctggagaggatgtggagaaataggaacacttttacactgttggtgggactgtaaactagttcaaccattgtggaagttggtgtggcgattcctcagggatctagaactagaaataccatttgacccagctatcccattactgggtatatacccaaagggttataatcatgctgctataaagacacatgcacacatatgtttattgtggcactcacaatagcaaagacttggaaccaacccaaatgtccaacaacgatagactggattaagaaaatgtggcacatatacaccatggaatactatgcagccataaaaaatgatgagttcatgtcctttgtagggacatggatgaaggtggaaaccatcattctcagcaaactatcgcaaggacaaaaaaccaaacaccgcatattctcactcataggtgggaattgaacaatgagaacacatggacacaggaaggggaacatcacactctggggactgttgttgggtggggggcggggggagggatagcattaggagatatacctaatgtaaatgacgacttaatatgtgcagcacaccaacatggcacatgtatacatatgtaacaaayctgcacattgtgcatatgtaccctaaaacttaaagtataataataacaaaataaaaaaaagaaaaaaaaatcagttctgactggagaagttagcaaaggatttgtgaacttcctttggaacttcctttggaactgtaacttaacttgggtggaaccttgctggaagtcatggtaaggtaaagataggttacagcggaagagaagcagcttagtgtttggggaggttcggaggctgggagagaatgaggctgtgatggaactgagaaaggccttcaagcccaagcagtttctatatgatatgaactttaccctacatgaactgtgatgcatatattttggctgaagtgcagaaatgtccccattttgaaaactgtgaagaactcccaggatgtctaattaaaatagggtatggataatgaaagtgatcccataagtgtgctggtggagagctgcttccacttacttttctgtgcaaacccaaaccatcactatcacaaagttccaaaaaccatgacctcagcaacatgtaattgttaggtactcactatgaatttcttaaaccacacagtatgaattcttttagcaaattaggccccartgattttactaagcaaaatgtcccactgtagaacatcatgtgaattttagagctagaggagctcagaatggggaaaatggataataatacgaattaaaaggaagaagttgaaattcctagttaaataatcattataaattatatctttcaagtaaaactacaactattgatttccatggtgtgtgtaaacaagacaatacaaacrtgttttataaactgactataccttttttcttaatttctctatatcttttaaacaatatttacatgctgttcattttgttttatttaattttccatatttaccttgtttttcatatctagagtatgacaatctagcaactctttatttctggtaacawtctaaaatgttttatttggaaccacttattatggcagatgataaaaatctaggctcagttttatcacctccacytaactcctaaaatagatgacataaattcaataagaatctaaatctacttatcttcagggtacaatacaaaatccatctacttattcaaatttttgattaacagcattcatatttatgaaatgctctgggctttgcaggtgaaaatatgtgaaactcaagtatcattaaatattctgtgatgttatcacagtgttttgtgtgcatatgtgctaatgttcaataactttaccctgagatctaatatgcatcataaacttacaaaacaagaaaatctcttcttatgtgtttaattcacctaataaatcacaaagaaaattataaaataagctatatcaataaagtagcttatggaatatcggtgttttgtttcccattgaatactgggtggtctgcaactgcaacacagtaactagtaagtattatctgaacatatatgtttcatattatgagtattatctgacacacacacacacacccacccacccactcacccataacagttcatgctaaatttgatctaacatctgtaaagaggaaacttctgacctttagcaaatttatcaataaaggagaatatctgcaatgttattgtctataaggcatacataatttttcaactcaaattatatttttggttaacctactcatgatggcacagactctaccctaataaggggtggtaggaagtacaccgaactaagaagtgttggggcctcagtgccatctttctctagatatttatgcgtccttgaacacaccttttcaactttcctgagctctcttttcctcatctataaaaccaatatgattatctccaatctccctccactaaaatgtttccattggttaatgacaaatgcttatgatgttactgtctctgatgatgattgtaaaaatatctaatatacactgagacctaaattatgcatcagccactgacctgtatgctttatatacactaactcatttaactcttcccaagaggtaactcatttaactcttcccaagaggtaactcatttaactcttatatacactaactcatttaactcttcccaacaacctgtgaggtagatactctgattatttctgtcttataaaaaaggttaaataacttgcccaaaatcaaagagatagtcaacggctgatattagaatctaggcagtttggctcagagggctcagttctaaccattacacagcactacaataaatgatcagactttacagtgtaactataaacagagtctttatcaatgagtttcctcagagtttcacgtttgctggcattaatgtaatttcaatctttaattgctaaacatttaattctctgcttgtatatcagatatgttaaagggatttcacagatataaaaaaaatgtgatccttaaaacaactctctgaaggatgttgggtagttttacaaaatttgcactcatgagaaaatggaggctgagacctagacatttatgatatgtcataattacaaagtcaagctgctttaaatcccttatagaaaaaggaaaggtaggctgggcacagtggctcacatccataatcccagcactttgggaggccgaggtaggcagatcatgaggtcaggagatcgagaacatcctggccaatatggtgaaacactgtctctaccacaaattacaaaaagaaaaaaaaaattacctgggcgtggtggcgcatgcctgtaatcccagctacttggaaggctgaggcaggagaatcgcttgaacccagtaggtggaggttgcagtgaaccaagatcacgtcactgcactccagcctggtgacagagcaagactcttgtctcaaaaaaaaggtaaaattcactagtcataaagccagtgaagaacataacaacatagtcagaaacttgggatttctaacttctagtcagtcaactgaatgtttagcactctccaatcttttctccaacccaggtgtgtctcctgcctgagatcctgacaagtaagatttaatatacccaaatgaaattcatcattttgcccctaaacctaagttttctcctaaattctttcttctgatcaatgacatcaacaattacttacctgaatcagaaatctggaaaactcttcctttctttccttcaatcttacattgtcaactcattctataaattctaccttcaaaatatagctcaactctatcttcatccccattgtgctgcttaatgtcttgaatcatttgcaggacataaaagatcctctgtgattgacaaccattaattcaccatctttcatttcttctgagactacagtcttaccaaatgacttgtagttcctcatactttagcataagttccattcatgcctctgtgaatgaaaatttctctgcctggaattcctgtttgctgtaaacacctccttatcctaaacacttgtccactaagaaatttttccttacctgtctccatccccaagccaattatccattctttcttgtacattcctgaatatagtacctttcatattatagtttaagggtaataaataaatctcatttgaatagatttagttccaggctctgtacttttaatgttttctctaatccttaaaaaagacacacactgaaattattatccctgaaacttagaaaggttagaagtctataattcagaagtgaggaagcccaagtttaaaatatgtttactccccaaatcttatgcccttcctatttcaaaatgttacttctttaattatttgcttacatgtctttctgctccattggccactaaattcacagaatgtaagaagtatgtcttattctatgtcttattcaaggctggggccccagtacctggcacgggatctggcatagagaaggcactcaagtgtctgatgagtaaataaatgaggccgtgtgttgtttggctcactaaataaaatcctattgttattaactgccatttaaatggaaatgccagttttatgaacatgactgatggagaaataagatttgaacaatgtttatgagtttttaatgtaatttttattgacttttttgtatcctaactcattaataaaagaaataaagaataatactggcatgctttatctcccaacattattcaaattgaattgacttttttctttcaataagatgccaggagtaaattatttctgttcttccagaaaggtacacctattttcacacaaaaacctaactcctatattataaaaatatagttgcatatacagtagacacaagtttgtctgtatatgttgatgtgattacattacttgactcttgactcaaagagattatattactcaacccaaaaagcagttgtggtaatcactaagtaatttttaaaawttatataataatatatggagtattctttatttaaagatggcaaattccatcatttatctgacaggaaaagtttatcctaaagacaagcttatcctaagaatagggacattctgctaaataaatttcagtttgtggaactggcaatggtgaaattaaggtactaagttcttttcctaaccttataaaagatcagagttcttcctactgtgatgcagtaaagactcagtgaatatttacttatttgtcctagtagccccaacatactttgagagcaaaattaaaggtgaaaagtgaatgctatcaaaactaacagatgaaaaaaattctgaagattttaaagttgctcagagataagattttgatggaggacctttggtaaagaactactctcaaaacattatggctattcattaattaataacagtatcaaagaacatcggaatttaaactgagagatcagttgaatatactcagaggcagaagtctgatctatgatatttctttatcattcagtaattgcttggagaacactctactgatgggatcacactaacacatgaagtggtcattcacttggacaaccaacagtgtcactgcatatgtaataattacatacataatgcaatacttacattataaacattctctataggccaggagatttaaygctgctcaactagtttacattataattatgggtattatcacctacattaattttttaaacaagacaaaaaatggatacgtaaataacaaaatatgaaagggtatgaaatgagatctgaatgtctcctttcacccttctttagcccctaatcattttctcccatgtaactccagtttctaggcatttgtctctattcacagaaaactgctaattatttacacaaataggatagactaaaaataattttctgcagctattttaatacttaacgtatattagaactctttgtatagttctagataagtaactatttttaatgtttgcaaaatatatatgaattccccaggctcaagagatcctcccatgtcagcctcctgactagctggaccacaggcacacaccaccacgcctggcttattattttttaattttggtaaagatgggttctccctatgttgcccaggctgggctcaaactcctggactcaagagatactccatccccgacctctgaaagtgctgatattacagggatgaaccaccgctcccagcctgtattgcactttcaatggatctttacctatgtgcatgcttttgaaacatcatgtctagtttcaagtggcttgttcagctggcaattcaataccacagtacttttctcaagacagcccttgtacttccaaaatgtaaaagtgatttatatatacttcccattttatcacaccaaatattaaaaaggatattatactcaaagattgacatttaataaaagaggaagtcaaattgtccctgtttgcagatgacatgattgtatatctagaaaacsccatcatctcagcccaaaatctccttaagctgataagcaacttcagcaaagtctcaggatacaaaatcaatgtgcaaaaatcacaagcactcttatacaccagtaacaaacaaatagccgaatcatgagtgaactctcattcacaattgcttcaaagagaataaaatacctaggaatccaacttacaagggatgtgaaggacctcctcaaggagaactaaaaaccactgcttagcgaaataaaagaggactcaaacaaatggaagaacattccacgctcatggataggaagaatcaatatcgtgaaaatggccatactgcccaaggtaatttatagattccatgccatccccatcaagctaccaatgactttcttcacagaattggaaaaaactactttaaagttcatatggaaccaaaaaagagcccgcattgccaagtcaatcctaagccaaaacaacagagctggaggcatcatgctacctgacttcaaactatactacgaggctacagtaaccaaaacagcatggtactggtaccaaaacagagatatagatcagtggaatagaacagagccctcagaaataataccacacatctacaaccatctgatctttgacaaacctgacaaaaacaagaaatggggaaaggattccctatttaataaatggtgctaggaaaactggctagtcatatgtagaaagctgaaactggatcccttccttacaccttatacaaaaattaattcaagatggattaaagacttaaatgttagacctaaaaccataaaaaccctagaagaaaatctaggcaataccattcaggacataggcatgggcaacgacttcatgtctaaaacaccaaaagcaatggcaacaaaagccaaaattgacgaatgggatctaattaaactaaagagcttctgcacagcaaaagaaaccaccatcagagtgaacaggcaacctacagaatgggagaaaattttcgcaatctggtcatctgacaaagggcttatatccagaatctagaaagtactcaaacaaatttacaagaaaaaaacaaacaaccccatcaaaaagtgggcgaaggatatgaacacacacttctcaaaagaagacatttatgcgccaacagacacatgaaaaaatgctcatcatcactggccatcagagaaatgcaaatcaaagccacaatgagataccatctcacaccagttagaatggtgatcattaaaaagtcaggaaacaacagctgctggagaggatgtggagaaacaggaacacttttacactgttggtgggactgtaaactagttcaaccattgtggaagtcagtgtggcgattcctcggggatctagaactagaaataccatttgacccagctatcccattaccgggtatatacccaaaggtgtataaatcatgctgctataaagacacatgcacacatatgtttgttgtggcactattcacaatagcaaagacttggaaccaacccaaatgtccatcaatgatagactggattaagaaaatgtggcacatatacaccatggaatactatgcagccataaaaaaggatgagttcatgtcctttgtagggagatggatgaagctggaaaccatcattctcagcaaactatcgcaaggacagaaaaccaaacaccgcaggttctcactcataggtgggaactgaacaatgagaacacttcaacacaggaaggggaacaycacacactggggcctgtcatggggttgggggagtggggagggatagcrttaggagatatacctaatgtaaatgacgacttaatgtgtgcagcacaccaacatggcacatgtatacatatgtaacaaacctgcacattgtgcacatgtaccctagaacttaaagtatattaaaaaaatamataaaaatacattccagagactaaaaaaaaaaagttaataattttactccttcatcaaaggcattcttaagtgaaactggtatgtattttttctcatgacagtatatgatggggatgaaaacaatgactattagttcaacttggtgctactgctttgatttgtacaaagacaccaggagttgtcccaccattgcttttgtaccatcaatgccagtattgacagagtaaaaatgacaaatttcttagcattctaataaaaatagttttgacctcaaataccccttgagattgttttggaaatacccaggggtttatwgaytccacttagaaaactgcttccctatatcctctccatttcaaagctgaggaaattgaggttcagagataagcaacccacccaaagaccgttattaaacaggacagtcaaaatgcaaacctaggcattctaaccccaagttcttgtccttgatgtccaagcacactgcttaggagacttttcaattggttgccagcactaccacagagttctttttagtgagatttcacaatggtccttgctttgccctctgggattataatataccttcactcatcaagcattaggttgcttctatgagccagggcctgagccccatgatgaggatgccaaaatgaataagatattgtcctcactttcaaggatttcacaatcaactggggagacaaatgtgcaaacaagacctatagcgttgtgtgacaaatactgtaacagtactttgtacaaagaattttggaagcacagaagagagggtgattaattctgcccaaagaagggagtagctggaatcaggggcttgacaacaaaagcacattttaattggacttgaaggataaatacatctaatccctttattcacaggaaaagagtccttcacatacttgaatacagctattgtgtatcccatgtaagtttccagtactttgaataaagacatactaatatcatcaagaatatattatgaagatgaacatagaaaacaaatcacataagaaacacctctggaaaatatgtactgatccttctgcaaggatatatgcaaatttattaaataaatcagcagttaatcatgagagagttagacragttcacctaacagccatgcagtttcttctaaataagaactagaaacaagtgtgcaaactaaaaagactgttctcaaagtgctcctatccagattttttagtcatctctcctctaagccagaggtcagcaaattttttatgtaaatgaccagactaaacattttaggctttgtaggccagatggtctcagaaaactattctgctctgcccttgtagtgtgaaaacagccatatataatatgttaatgaatgggcatgctgtgttccaaaaaaaactttatttacaaaaataggcccagatacggcccacgggccatagtttgctgactcctgcactaagccatctttcttcttgtgttctccctccttcccctgcacagtagtaagagcgttaggtctggaatcatcagaattttaattctacccttgctaacaaccaactgtgtgatcttaagcaaactgcttgatcattctggcactctgtttcttatgtcaaatcaaggatctttggattatatgatcaataatggccctccttaaattccaaagaatcactgcagagtatgtctcctcccctgatactcctaattcattccagcatggaatacactatatgagagactggcaaaaaataaatgtgaccttaggtgatactaaaagaaatgtatatgtcaaatgaagatggggcaagcctagtctactctacacaagatatatcacatgtaaagttcaattatgagtaaaacactaacaagactctccacaggaaaacaaccagggatctaaaagattctgaagattttggtaaatgagatatggttgaaaaacctgggcaagagtggagagcaaaaatttagtgagcataatactatctttcaaaatgcttgtaaccaaacaaatattagaacataaataaaatattccaggcctaaatgatatttctgaatcctcaactataatgagtrtaagttctgtgccttctaagtcttcgtagcatcttgagtctgtaaagttattgctaataacaatgttagaagtaacatcatttccaatacttcatatatgtatggctatttaaagtttatatccttgtatatcacattgttcaagcttcctgatcctatgagattggcaaagatggtattattattgtctttttacaaataggagagcagaaattcaaaaagtttattctgtacctagaagattactgaataaacaacataaaatggggaggtgctaaagctaaactccccaatcaggttagaaaatgtagatggaagactaaaacagacatcaccaaatattttatagaacatcatctcctttataattctcagaggaaggagagcttgggggagtgggatataacagcttaacagcttcaaagcactttacatttggaaatagttgcctagcattttgctttagctgttagtgctcaatttacctaatttttctgttaagtgcttcaatcacatgtaaatgtgttatgaatatagctcataaaatgtctgaggggtggtgttctataataaaacaaccccaaatgggaagaattctaaaaacgaaaaaatattcctttccatttsattggtttcagataaatgccttattcttagaaaaacaaaaaaacaaaaaaagagagaaaaaccccaagcatctgtgaataattcaaagtactaaatggcatgaatagattcatattttaatgttatactttccttttatccagacacaactttgaacataataaatctagttttagaacttgaaatcctcaagactctgcatttggtctctttttaaaatatgtataattaacttcatctttgaaggctcctggaggttgtagagggcagaagaaatgtgtttttgttaaaatgagccaatctgtgggaggcctcccaagtttcctgcatagaaaattacaaagagatttgagagagaagcaatattgaagctaggtatccaaagagaaaggatattatgcattgataaattaatctcaatcagcgctttttttcctgggcattgaggataccaatgagggaacagggctggggcaagtcacatatgtgcttagtgtcattcccttccccaactctccaaattttcttaggttaaatcagattatttatcactaacatcccaggttaccgtgcatgagaaaagaggttaaaaaaggaatgatttgtagtgtgcttagaaaggaaaaagggacattctaatcttgtgtagagaagttgagggaattgatgggctgacagcatatacatgggccttatgcctttttagcaatagtgaggctccttcactttcctgtggaccgcttccttctagaagctcaggttctccaaaggctgtggctaggagggacagcatttaggacaaacgtgttggacttcacatgggggtttgtttctaaaaaaaaacagtctataagacaaaaatgacctgaaatcaaaatacccttgaagatctcttacagtttccttaaagtaaagtggacacagttttacatacacaaccctgtactgtaactattcataaatataatgttctcagtaggacacagtttataataaagaaggccatcttgtacygcaaacaaaaaaaacatcaaaatatttcaattttaaaaatgcactcagtgatgtgagaggctaataccatgaggtgtgcaagaagccacttgagagtcatagtatggaatggakaccaaattgtccctactgtttataatgtcagatacctcctctcctctttttctttttattttctctctcttcctcccttgctctcttttccccaccagctgttgttgaaatcaagtaaacctggacactcagatactccaaggcattttgagccttaccagttttctattgctaccattacagtatatgtacaatcaccacagacgtatagcagcttagagcaaacacaggcttagaacaactcaagtctattacctcacagttcagtaggtcagaagtcagaactggctgctctgggtttcccaaggccgaaattaaagtgtctgctggcctggccctgggggagagttcacttccaagctcatttggattgctggacaaatttagctccacgtagctgaaggagtgaggtctggcttccttgctgcctgtggactggggtcgttctcagtttctagaggccacttgcattcctcgacccttaaagttggcaacagtgggttgaatcctcatgtttcaaatctctctaccttcccttctacctcatctttcttctgcctccatcttcaacagcttctctctaacttttctgttttcctgctttgcttttaagggtttgtgtgattacattaaatattgccccctcccctagaracattcaggttccttatctaatttaaggtcagaattattaaacttaattctgtcyccaaagtcccttcacataagtatctgggtgagtgtttgattacacaatttgggaatgggaatcttgagaaaacttctttattctttctaccatatggtartaacaaattattggcctttcaaacgtatcttgttatagcccctaaaatatgctgcatatttagccaaaagacacaagcagccaacttggtaaataagatctcatttgcaaaatgaaaaccgaaatggaaacttaycaaaagaggctgttatgagaggttacaaatatttcaataaagggttgcaatagcaagtataaaaataaccatgcactaaaagaagaatgctctggcctgacgaaaatactagagggaaagaatctgcagaatcttcatttgttctctagacatttggggtcactgatttattcagaggtacccaggtattctttccaggtgaagtctaaagtgtttagtgctttaaaacaaacagtgctctcagacttgttagaggcttcggtgaaagtccctaattgaagctaaaggtcccagcagggttttttttaaaactgcttccgaactgatttgactttaaaaccactctgtagggctgggcgcggtggctcacgcctgtaatccccacactttgggaggttgaggtgtgcggatcacgaggtcaggagatcaagactaccctggccaacgtggtgaaacctcgtctctactaaaatacaaaaaattagctgggtgtggtggcgtgtgcctgtagtcccagctactcaggaggctgaggcaggggaatcatttgaactgggaggtggaggttgcagtgagccgagattgcaccactgcactccagcctggggacagagcaagactcctctcaaaacaaacaaagaaaaaacaaacaaaaaaaccctactctgtcattctgattttagccaggttttgcactgtactgtcgttatcctggtatattcatgggttttgctaaataacatcttagcaaagtaagccatgctaaagttcaggacgtcccagtatgtgacacattccttctcttctagccagtagtcatagaccactctcttcagctgacaagcctgccttccctatttttcacaatctaaaaggggcctgctggtggcgtgcttcctagcttttctgtagctttacttggcctggtgaccattggtgaactcagaacgttgtgaagcccaagtctcgagytatgtacctacccagaactgaatttaagtcacatggatcaccacttaaccctggacaggcattttgcacatagtgataataataaaaagtttcttttgttcacaagtaccaccaagaaacttagaattcttcataggaattctgctatcacagagataaaaattactggagtatgagaatgcagagggagaattcaggtttctctgatcatatgaataacataaacatatagaaatagacacagaagtcgtgatgagtttttctaattctgagaatgcatttaggtaaccaggccagtaggagaaaggattagggcaggtttccctgctccctccagtacagctcctgacatrttttcctctgggaactctactggtgatcagtaatgcctcactcccctctgccacattctacctcatacataagatgtaattaattgtcatattatggccttgcttcctatttaatgcaagggagaacatttattgcattgctggagatattcattctagaacaagaaaaagtggagctcttagaagagttttaatcatgaggtcgggcacggtggctcatgcctgtaatcccagcactttgggaggctgagrcaggcagattatctgaggtcaggagtttgacactagcctggccaacatggtgaaatcctatctccactaaaaatacaaaaagtagcagggtgtggtggtgggtgcctgtaatcccagctactcaagaagctgaggcaggagaatcgcttgaacctgggaggcagaggtcgcagtgagccaagattgtgccatttcactccagcctgggtgacaagagtgaaacttcgtctcaaaaaaaaaaaaaaaaaaragagagagagctttaatcacaaaattagagtatttttaattatgtcttgccacctaggggcattcttagaccatctggggggatggctgatttttagagacttcatagtacattcactgaggcaaaacaataaatttaatctttcagctttttcagaagttcaatattagaagacgatttaaagcaatgacttttttaaataaaataacttgcatattaaacattacatttcatgttacagaaggcctaatatgacaaattcaggataaatttcccctgtatttcaatggtaactcagctgtctaagtgcatctcagccctttggttttatttagtcagtgaaaaagattttggtttctgcttagctttagctcaaactcctttgaatggggcaaacacaagctgtaccattctctttggtttatgcccagtcaattctctcatttacttaccagcctgattcatgaaggcctctgagatgaatatgaaagttctcttcaggtaaacaatgagaactagatcaactaagttattttcttttttgcttcagatgccagtaacttgagaattaagtttagtgctcatctatattaataaattcatttgaagttgcttctagcgtctttctccttataatttcattggttgttctaagtttatttagaagtctctagttttttattgtaatttatttttaaagcttcttcaaatattctttatgaataataaatcttaaatgtagttttaaaactgggacttccacagaaattcactgtagttactgctggagcacattcagtttagactatcactttcccataccagcacagcagtctgtcatgtaagaaatggtcactagacataaatcaggccttactggtcatattaacacaaagttaagagtgtgtgtgtgtgtgtgtgtgttatatgcaactttatatatatatatagtgtatatgtaacatatacacattagctcaactcaatactgaagaaagttgctaaacagtgttctagcaattcatcaaggagactggtaccagaagaaataggagacaacccctggaaggaagaaagctttgtgctccgtccttccaagtatataagtataaacatatatacctcaccattataccatcttagaacaaagaattaaatttttgagttcacagcttttgtagtttagtatttgctgtacaatcaaaaacttaactcttgagttgcaaacagtttgaagaagagaaaactatagcatgtgacagtgcaaagtatgaaagtagactaagattgggagctgacttttctacaaagagaattgtagggattaagacaaatttaactgaaagaattggaagaagagattacagttggcagtagtgatcttctcaaacaccctggcctttgtggagtaaagcacaacttggttctcatgaaataggtgctttttcccacctgccaggggccacaggcctgccatgtaaccaatcaccctcagaagaatggatgccaggtaaacactgagtgccatcagccaggacaggtgccagatggaagcattcacctgaaaatttttttcccccagagaaagattcatcacctgtgccacctagccttagaatctcaccaccagagcaccttaggcaggaataagtatgtaaaacaggtagctaaatcacmtttagtgctcagagcagkaaaaaatgtttgcttcacctaacaatagtaagaacaaaataaaaactttgctgcaaaaggatcaaaagagattttgcccaggggcttatttctgggaacaatatgagagaacatgctgggagagagggtagtatgactctaactatcattatatgttaaagaataaaggtgtttattatctgaggccaaaggtctgatccacttacctaatatgcggtatggcagtgctttttatagactctgaaatttttgtcctcagatctctcagatgatcaaagactcttggaaagctgccaagaaggtctctggctcatcaacctgctttccccaaacatcctgagagccctaggaccaaggacaactataaaccagagaaaacaaccaggagtagcaaagccaggacaattaaagtgtttggttgtaaatttcaaatcatttctccaaactaaaatacttgcctttgttcccagaaggtagtgttgtgttaaactcagtagcatttttttttttctcttcctgaatctctttttctttctctgtgaattcacttggtagaaatgagagctatgatctttgcatatatgacactgtattcaataaatgttaaataacagaagattagaactcttttaataattctgtttgttattctcattgtttgttttctcttgttcttcttattcaacaaatctttcttcacatgcctcacattttttgagggcagaaaatttttgacccatttttcccaatgggtcactgactttgcagagcatggcatatgctgaaatgaacattgtaattacatttacacccagggcaacacccaattgttcactgtcatttgtagctagaagcacctacaaatgacatatattaatgaatgacagatcctgtggtgagttaataagataacaaatctcagtcagtattgcataaattgggagtggaggggagctgagttctttgtaaacatgtgacctggtggaatgaaatctctgtaagagcaattcagaaatgataaggttaggttaatactggttcctgtattcccgctgttctatcaacccactcaattcctacattccagctggttgtgttccagaatttctctgagagtaaaacctgaatttacaagtattgtcataaattgggggggtggtcctcatgatatgatttggctgtgtccccacacaaatctcatctggaatttccatgtgttgaggaagatacccagtaggaggtaattgaatgatagaggtaggtctttcctgtgctgttcttgtgacagtaaataagtctcacgaatctgatggttttaaaaggggagtttctctgtacaagctctcttctcttgcctgctgccatgtgagacgtgcctttcaccttccatcatgattgtgaggcctccccagccacatggaactgaaagcccaataaacctctttcttttgtaaattgccagtcttgggtatgtctttatcagcagtgtgaaaacagactaatacacctcataaacacacatggcaaaattctctcatgcatcataagttattaaaaaatccccttagaaacctctgtggccctaggcttttggttgtttgcccttgtgctttaggtggctgatgtggtataatgaaacataaagcattaatgaaattctcttatatttttgccaattgaattggaaaacaattttaaagactgataaatccagaactaataaggatccccagggtgcagagaaattctgcttcactgctgatggccatgtgaattaccacaacctttctgaaaagtaatatggcaaggtccattactatttaaaggtgaagataccttttgaatcagtaatctcaagttcagggattyttcataaaaattaaaggcagaatacctaagtatttatgtacaaggttgtttattgctgttagtaatggcacaaaactaaaaacaacctgctcatcaatagagaaatgattaaataaaacatgatacattcatattatggaatattatacaactattaaaaggaatggattacatctacaggtattgacatcaaggcaatgtctataatacactgtataaaaagaagcaagttacagaatatgtgtatggtattccagtttaggagagaagaaagggagggagaaagagtaaagaagggaggaaaggaggtgaggaggaaagagagagaaaagaggggaaggaaacaaaaggcagagagacagagaaagagacagaaagggagaaagagcaagaaagaggtaagggtggggaatatgcaaaaatgtatgtatgtgtctatcttcatattaaaataaagaaggactactatgctgcagatgattttaacacttgctacacaaagacatgaggctgaaggagggaagatgaagttattattaaattttctttatttacttccgtagggttctatttggtatagagagaatgaattactattgctgcccgccatcatttaaaaaaaatagcttaatgaaaaagataggttgatgtcaactatacaggggcctcaagctacttaagagaaaaccgatttttagttcatgaaaatttgagatgaatgggggttgggaggaaggcaggaagggtaatgtttactgaaagtgtatttctgaatgacagtggagacaaacaggtgctttccttcctaaccgggaatcccagcataatttagacatgaaaatgcccagaaggcctggcaattgagcctttaatttctacctgtaaattgcaatttatatgttggggatggctctattgagaaaccaaagactatgtaagaacatattgttttcggccctagactagggcactcaatttgttttggtcaaatgaattgcgggaataactaaatctcactgttgttccagcaaaggccttggattaagatatgcatttaacatcataggtagaaatagtagttagaatttgtaatagactagtttttagcttcctaaataatcatattcagtcagtagttatctgggcctttgatcctatattcctgaagaattttttagcatgcacaccacataaatacacatttatctataaataatatacaygttctactattaagcaatattttgacttaatgctttatgaacataaatagaagtagacgttttattatattgtatttatgcatcttcaatggtttgtcctttgcgtttcttgtgatgtgtgcrctcttctttggggtctacagttttataggttgctatggtttgaatgtgttccccgaatttcatgtgttagaaacttaatccagtatggcagtactgaaagatgggggccttaaaaaggtaactggataatgagggctctactctcatgaatggactaatctattcatggttaatggattaatggcatatcataggagtggaactggtggctttataagataaagacccgaatgaggacgtgagcatgctcagcccccaagccatatgatcagcaagaaggccttaaccagatgtgacaactcaaccttggccttctcagccttcataactataataaataaattcccttttaaaaaattaattacccagtttcaggtattctgctataagcaacagaaaacaaactaataaacaggtcctaagactttatttactgagtccagttatatgttctaatatatacatggaacagttaatttatttgagtcaggaaaaatatatcataaggatgatctctgactgccattcagctgttgatcttaatgtagccttaaatgttttaagatctagtgattttgttttccatgaatattcaacactttagatctagtagatgttcttattaatatgataataacagcatacttaatatcaccgcattctccagaaatcagggatatgttagtttaacaacaaatttcagtgctattgtttgacccttaaatttcttcatttgaaccatcttaatatatgaaaatacagacttaagaaaaaattagacgatgattcacagtgaaaattttctattgttacatgaaggacagaccttggaatatctttaaaaaactaattccattcgctattagcaaaattatgccaaatatgtattagttatgaatgaacattagtagaaacatcaaatgaacaaatgatattcattaggatttgtaaacactccttggataataaaaaaaaagtctattaggataattcaggctgtgctaaaaggctaattcattttcaacttaggttaatacaaatgccattctttcttgacctaggtatagatatatcagaaatcatttttatgacaaaagaggtccttacaagagaatkttgagtatgtagtccttaacaactgcctcctcctacagctgtacctttaccccaagcactcagtatatatatatgaatattccagattattgatttgagacagtgcaatgaagtttatttaagcacataaatgcttaaacgtgtgcacatatattttaattaatattaaacacatgaatggataatgagggctatgtatgtgttcctatattaagcagatatatctaccaacctatacctgttatgaatagataacagctatatatgatatctattcatattaatcaattaaataattaattgattaatagctgcttatattaattaagcagatatattttagtaaattagaacatttaaagactatcattgtttcattcatatagtatcaactaagctgatatactctgcttgcacacatccctccctcccatggttctatccactgtttctccttccttctcagtgctcctggatgagtctttgatgggctacactgacagacttctctagtgtctggcttttgtttggaattagccagcagagggccaatgagaagaaaacggcagaacatagagaatgagattccctttctgttgggctacagtttggcagaagtccaggttccttgaacggtcacagctgctgctagaagttccctcctatagctacaacctcaactgaagctctttgtaggtcctggtagtatctccccactttcaccctcagacataggagcggtaatagctcctactattgctagcccaggagtgcttcgccatcccggttttctgttatcctttttcatacctttgtaaatagtttcctatctacaattccaccaaattgaatgtgccatcgatttccttctggaatcctgacccatatgcttatacacagatgatctattaaggctctataatatataaaaataaacaaattagaaattgattctgctttcaaacagtttacaatctggaaaaggaaatacatgtggtttaaccgatatcattggttaatgtctgcttagctaaaattgagaaggtgatagtactgtcacataaatgcagagggtggggtggaaaaaggtagaaaattacatggaataacttgttctctacatgctgacttgaaataacttatttacatatgatagtatgaaagtgtatttagaaacattttaacaagattttagaatatctaccttcctataatttgtgtatatgtaacatatttgaaagggcaattaaaaattacatgcccttgctcctaatgattgtatcacatayatactcattttatgaaaaacttttgtctcttttctatataatatttgtttttttaacttctatatacaaactctcaagtacaaaaatgttatttcatagaatattttaagctctctattcttaatggaactattaattatacattttggcaatttggtagggataaactcaattttggtagtaatataacaaaccatgagctggattctaatagtgagaaggcactagggtttcataaaaggatactagttaatggtgtttatttaattcaaggggccattcaataaacttgaaaaagcacttttcaagttttacatgaatagttaaatttagattttcaagccctactggtatatcagatgaattaacaaatgtataacacacggtttccttttttccttttttattgtatacatttaaggtgcacaacattatgttttgatatatatatacccatagtgaaatgattactataggtaagcaatttaacatatccatcatctcacatagtatccttttaaaaatagaacctttacttcaaaacatttaatacaattaaatgttttaatatgatgagatggatataaacaacagatgagaccaaaaaaggacatgattcttgtctttaaaatatttaatgaaaaaatctatgcacgaaaattaatgatagatgacaaagtagaatcatttctctatagatgtttatttttagataactaataaggctaatctagaatcatttagtttaattagagtttaacaaatattcccacatgaatatgttcatgcttgcttcacagcttcctcactttcttttatcataatagatatgtcattcacactgcatttcagatcaaattttacatgacttcaatagatacattatagaattaacaaatattgaaatactattgcttgaagacttttttttaaagaactggggcttaagaggaaaatcaattttcagataagacctactatacctggacttggcaaacaaaaagtgcttacatatttgcagaagtaactgtaaagatcaatgactacattatcaaattgtctaagaattgatgtaaaattcaactatttcaccctgtcccaatggcatgagtttcaaaatatacaaacataaatatgtctaagttaaaataaacactgggtcaataaatctcaaatttataaagtacactcaaagctttgaactgtacagcctcaagtgatacattagcagtacagacatacattaaagcacttagcatgaaaattgtccacygtaaaatggggcagaaacacattaaatattcttatcaatctcaagcccaaaaggattacaatttagaacatatgcagttcagttattcaaaatggactcagtagcttctccaaaaatttcctaactatttggggattttttttcctctccacttttgaatctgctgaacagggagaacaggaagaaaatatttcaataatttatttttgtttatttgtctgaaatagcaaatcatgaaacactcactgaacataattagctcctctgcactgtgattccaaatctctctggatgctgggccagctgaccagatggtgtgctgtaacataatgcctttgaaacagaggcttgagttcgggtccacaggccacaggacaacagaggcagattgcaccgtggaagtgatatattcaactcggaaggcctggggctggcaagtgctactgtgctctttgccaaagggcaaaccaaatgccatcttcctcaagcctcaggctctattgttgtacgtggcagcttattgtgtttttaacctttgggggaggcagaaggaggggagattgtgagaggtcaggaagacaaaataggtaaggaagaagggaaagttaatcagtttccaaaatacttattacctgctatgctgagaaaggatatgayggcatttgcaaaaggataggctgttcccctaaattaccttgtatacaaaggaattttcttaggaatctttttttgttcttaattaataagactgattggttagcaatctgccttatgactaagcctgacagagcttaattgaaaagaagcttaattgcaggaaagcaatggaagaaattcattagagaagtcttgaaatctgaaaattatgggcagagcaggctacccgaatggaaattgggcaatttaagatgtcttaattagatttaaaaccacagcttagaaaaactaaattagctatatcgaatcagataaaaaaaatctgagataaaatgcatggttattattggattactcaagatagtctgtatagctttgtgctggtaattctaaaactcaatctttatgaggagtaacaacgacgacaaaaaagacaaagaagacagtgwacatgaacttttaatggtattgaatttattccaagccttatagtaaatgtttaagatgttttaataactgcccactgccaattatcttgaagaaatccaaaaatggtaagcaaatagaagcttaatttcaactttgttggcaaaaaaagatgaagaaacaaaccaaatactccaatttattactgatttgagatttagacatttgcataaaactgttgtggtttgatggtgatgacagtatgggtatggagggggccagtcagtcaacaaagtagtatacttactagataaacatggggcattggagttaaaaataaaggaagtagacaggaagagaaaaatatccaaaggtatttggataaagcttgtcacttattcggttatattattgggtaaatatgtctcaggcatcatgctgaagattcatcttagaacaaaatatacaaggtccctgctataatgcagaataaaactyggtgaacaggatggacattaagcagagataacacagataaatgtaaattacacattgtaataaacaccagaaaaaatataaagccatcaatgtgacatgatagcaggaaaatgtgatatggataagggccttgctgaggaagtcatatccaagctaagacctgaaggctgaggaaggaacttctcttggctaaccagtgccaagggaagaatattctggactaaggaagtggtccgtgtgtcggcatgggaggcagagagggtggccagggtggctaaggcagggcacatgagtgaaagggcaggagagatctctgggataggaggaaggggctgggtcctgcagactgttacagactgggtttcgtgctaagacttaggatctaagtgaagcctggagcctttggatggattygagcagaagagtgacatgacaggatttgcagttttaaaagatcactgccattgctgagccaacagtgtggtaaaagagaagcctctggattcccagtgtgcgctggctagtgtattcatctgagaaacatttttcgacatctattatttgccagttccactgaggagaagagaaatgcaaagatcaataagctcagagttttctttcaagaaatgtaacaaattattaaataaatatggtttatcasaggtaaatgtgtatttagaggcatgtacaaaatgctaaaggagactagaaggaaacttcataaaagagataaacatggaactagatcttgtaaggacataagagagaaaatgtttcagacagcagcaattgcaaaataatggagtcatagaagagttcagtatgaaatggaaaccaaaaaaagtttagcagttttgcacccagaaaaaaagaaaacggagaagggtaagcttgtaacaaacggatgggggtcttttatatgctaaggtatttgcccttcatcctatggttaatcaataggggagctttcagatgtattcaagccagatgacactgtagtttagaaagataaatctagtcctacgcagaagacagagtgggagataaagcacttagtggcagggaagacagtagcgcaccagcatggcacatgtatacatatgtaactaacctgcacaatgtgcacatgtaccctaaaacttagagtataataaaaaaaaaaaaaaagaaaaagaaacttctacagcagtccagaaggagagatggtgaagctacaacctaaaagacagcatggaaatggcaaggatggacagtttctctcccaactccacatttccatctctgcttctcccacaaccaactatggccaggaaatttactggtcacagggttccattacatgtacaccaaggacaacataaaagtcggtggagtcaaagtgcaattaagaggattgaaaggggrggcccagaaaaagagkcccaggcacaaagtttcctacttcctcattttatctaggaaattggatggctcttttatttccaaactctcatcagctgggaaagatttaaaaagtagcatgtgtcataactccaatatttcaayctaaaatccaaaaaagcagctgcttccttgcaagaacatgctcagagctttctctctcacctttcctttcccctttcaccttcattcactgtgttccatgtttatttgtatacctgtctccctcagcatctagtacagtgcttagcagacagtgcacactgaaataatattaggttaatgtttatttataaagatagtaattgatgaatgaaaatatatgttaatttatttttgttcctgagagagcttttgaraagtatcagctccattctccatatcccagattctgacaaagggagtaggatagagcctgctcgtctgtgtttttaaaaagctcccagctgagtcctctctgcagccagattaagaactcctgccctrtaatctcctgactgttaatgacttaagggcccggggtaaaataaacttttatctttatcaaattgttatatttttatcagctatatttacactagtttctctctgttctatggcattcatccatacctctttactaaacttatttccaactgattcttcttagtagatcataggtactctttattataattttccttgaattctttgcagtgcttgatcggactgtctaacacttcatcacaaactgtcttctcccttaacttcacgattccacattgctatggtctaagtgtttgtgttcccccaaaattcatatgatgaagcttaagcaccaatgtgatgaggtatttaggaggtaattaggtcatgagagtggagccctcatgaacgagactagtgcccttataaaagaggtgctagagaatttccttgcccttttcccaccatgtgaggatagaaaaaaggtgccaactataaaccaggaaacaggccctcagcagacactgaatctgccagcacactcatcttgtactttccagcctgcacaactgtggagaagtaagtttctgttgattctaagtttcctagtttatggtattttgttatagtagcccaaatggactgagacacacattgttctgggtaaggcctcttctaatgatcaccacaatcaggtgatttgttatcacagattcagctgttaataatctagtagtaatgttagaaaatatacagcctttcattctgatcatttaacccccaagaaaaccgagaacctgaacagcgaagtgccttggccaaggtaacatgggtggttacttccaagaacaccaagtttctttagctaaggccaggatcctgcctaccttgcttcacagcgtctctccaaccctgatttcttttttttttttttttttgttgttgttgttgttgttgagacagagtctcacttcgtcacccaggctggagtgcagtggcacagtcttggctcactgcaaattccgcctcccaggttcaagcaattctcctgtcttagcctcccgagtagctgggactactggcgcctgccaccacgcctggctaatttttgtatttttagtagagaccgggttttaccttgttggtcaggctggtctcgaactcctgacctcagatgatccatctgcctcagcctcccaaaatgctgagattacaggtgtaagccactgcacctagctcaaaccctgatttctaattcaaccttgaatgcttccaactggccatgggaaaattttacctggatttcctgttttcacttgaaaataaataaggacatagacattcttaatatattagctgttattcaaatccttgtgtttggcattactctatttctgtcattgactcaatttcttcaattaccatcttaaataaacaaatctaattaaaatccctctgttaccaagccctgttggtttttgacatctaccttgtcctctatcctaccatggctattattagagtcaaaggtctcctcaaactactgtctagaactaaagtttcttcagtgttttccagatgtcctctttattcaacctttcatcaatatcacagttaagaaatattttgttatgtcacmttctcaaatattacatttgtgtatctctaacaacacagcacaaaaaatattgcatgtgaactattcaagcaatgtttgttaaattatgctgatttaaaaagtcaagctagacatattctaataaattaaagttacaggactatttcaataagttttaggagttcttagaccataatacattgaaaaggtttgctgaaaagctttttaagatgtacaacatggataaggaaaaaaagtagtgtaatacatgcaaagcacctgattttctgtttgtacttttgtactaccataaaacatgttttatcttaaatatatttcttttagcctgattataatcgatttaatacacgctcatttgagaaactcagataatacagaaaatataaagtgaaaagtaaaatagcattactttgtctagctaatcactgatcctaacttgagctgtaggttcaacataayctcaatcaaaagcaagttgttttgtagatattaacaaactgattctaaagtgtacctggagaaggaaaaaacctggaatagccactcaatattgaaggagaagaagaacatcagaggactgacattagctgattttaaagctacagtaatcaaaacagcatgttattagtgaaagaatagacaaagagattaacagaacaaactagtgagcccagaaacagggccacaggatatagtcaactgatctttgacaaaggaatgaaggtaagtcaatggagaaagcacagacttttcaaaaaatagtgctggaacaacaggacatccttttgcaaaataataataataaaaaatctagacagactttacaccctttacaaaaattaactcaaaatcaatcatagacctaaatgtaaaacacaaagttataaaacccctagaagataacatggaaaaaaataaatgacgtagggtatggtgatgatcttttagatacaacatcaaaggcacaacccatgaaagaaataattgataagctgggcttcattaaaatttaaaacttctgctctgtgaaagataatgccaagagaatcagacaataagccacagactgtgagaaagtatttgtaaaagaaatgtctgatagagaactattatctagaatatacaaaaactaattaaaactcaacaataagaatataaatcacctttaagaatgagcaaaaagtctgaacagacaactcaccaaagaaaaaatatggttggtaagcaagcatatgtaaagacgtccaacataatatagcatttgggaatttcaaattaaaacaacaatgagataccaccacacgcctatcaggagggccaaaatccgaaatgctgacaaccccaaattctggtgaggatgtggagcaacaggaaatctcactgatagctaatgggaatgtaaaatgatagtcactttagaatacagtgtggcagtttcttacaaactaaacatactcttaacataggatctagcagtcacacttcttgatatcttcctaaataaactgaaaacttatgtgcacacaaaaatctgcacacgaatatttatagtagctttattcataacttccaaaactgggaagcaatcaacatgtctttcagcaggtaaatggataagtaaactgtggtatatccagacaatggaatattattcactgctaaaaagaaacaaactatcaaactatcaaaagacatgtaggaaacttatatgcaaattactaagtgaaagaagccaatctgaagaggctacatactatacgatttcaaatatatgacattctggggaagaaaaacaaaaacaaaaaaactattatgacagtaaaaagatcagtggttgccagaaattagttgggaggaaaggataaaaagtcagagcacagggatttttagggcagtgaaactattctgtatgataccacaatgagggatatatgtcatatgcatttgtcaaacccatagaatgtacacaaccaagaacgaactctaatgtgaactatagactttgggtaataatgatgtgtcaatgtatgctcatcattgtaacaaatgcactactctggtagaggatgtaaacagtgggagaagctggggtatgtgtttgtgaggacagaggatatatgagaactctgtactttctgctccattttgctgtgaccctaaaaatgctctaaaaatatagtttactaattttaaaaaaactcagtgtacatatctatctgattttttgataaagagtaacttacaagaaatgaacagaaatcataaaacataaaataatcgagagatctgtctgtacttttaaaacaatacatgtctacgaaatcaaaagtcaaattacaatataggaaaaacatttgccccaaatatcactcatagtcccttaatattatataaatcaatttgaaaaataaatttcaattaaaaaagacaaagttcatgagagaaaaattcacagacgaaatacacaaatcactaatgaacatacgataaaatgttcattgtccttgtaatcaaagcaaaatgtaaattaaaataatgatgtttatcacgtatcaaattaaaaattagaataagtgacagaaatcagtgctaaaaaggtaaaagtgaaatagatgctaccttacactgccattgggattttgcagcagtaaacattttctgtaaagcaatttgacaatatgacaatagccttgaagatgttcctacttttaacccactaattctacctctagaaatctgctttatggtagttatcagaaaggtagaaaagattcatttattaagatcattctcatagaattatttataaatttaaaaaatacaaacaaaattagattatgccatataagtgtgcagtaactaaaatatgtttcaagtggtcttagagaatgttcataatataatatttagaaaaatattttcttatagagaaaaattcaagatgcatatagggaaagtatgtagaagataatgaaattttaaaatgatataattgtctacctagaaattcaaagagaatcagtgagaaaactactaaagtcagaaaatataatgcataatcagaaaataaataagaaaaaagagctatatatcagcaattagggtaggagactggtaggacttgttttctgctatcaaaacaggatctggtccatacaaaataaagcaaaaaaaccaagtaggaaccagcgatccctagctgccttcattgctcattggcataagacactcctaccaatgccatgacagtttacagatgcaatgacaatgacccagaagttaccacctttctccatgacaatgacctggaagttactgcccctttctttaaaagtttgaaatgatgggcctctcaatttgcattgacctgccccttgatttacatataactgaaagtgggtttacatatgtaaatataagttgccaagagcccatacattgactctggctgcactgcctatgagttagtcctgcaatgcaaggaacggtaccattcaattaaagactgctgtctaataccactggctckccctcatgccaagaaccctcctgggctaagccccaattttagggctcacctgtcctgtaacactaacactataacaaattaggaaatatagtaaaaaatcaaaattcttagtaaaaaaaaaaagaaaaagatactcaaaagtcaggaactataaagaaaagactgatatatttttatgtgctgttggacagaagagctgacaaaagtaatataaaagattaaaactggaatatatatttataaatgtagacagacttgctattcataatctagatagcaagtcagaatatcaataagaaaaagaaaatatgcctcaattaaaaagccaaaaaagacatggaaaaacaatttgctaaagaaaaaaaagattaataaccatgtaaaaatttgttcagcatcacaaaaacctcaaagaaactaggaaaacaaaaagacttatgttgattagattggcagtaattaggacgttgattaagtctaatgtatgaggttaaattctttctgactacttggtagagtatgaatgtatataaattttatggaggacaattagtaatatttgtcaatggacaaaattttaaatgtacatattcaaaaattgtgagatttcaattctaaaacttattttagcaatataagttcacaggtacacaaagatttatataaatagatcatctttacacaaaaactcaggatatacaaacacactagacacctcttgtaagccacttcatatttattaagtctaatgtagacgttgtaccattcaagcaggtgcatgatgcacagaggaattaatgccccataagcaaactttggccaatgggagacaggagacagcagataaattactctcccttccttccttgtcctgagacgttgtttatgttgcctttgaagatatgattctgaaagactgagcaatctatyatgcttgatactgagcagtggtcagctcagtacctcattctcatttttgctttcctgacatccttacctcattttccttttcctaaatgtgaggccattttccaaaaggagaagggaaatgaggcaagaaagccacttaccctctaggattgaactaactcacaaaattatgacacaaaagcctttaccttacacattgttatctgaaaaattcttagctaaaagaaatgcagaaattctaaatgtccatcaataggaatttatgcagaaattaaaaatgataagatacattgatttgtattgatatatgtgacagatggaattttctaatagtggtctagcaatatttctggtttcacattttatttcagtgtcgttctatttctcttctaagagctggagtctacatccctacccttgaacatgggcaggcctttgtgagtgatcaaccaatgaaatccagcaaaattgacactgcatgactgctgaggctgtaatacaaaaggtgatacagcttccacttcgctctgactctttcacaaaagatttgcctttggaatacagccatcatttggtgaggaaactattatatcagaaactgtgaagggtctgagattttatctttcttccaagtgaacaatttagactgccacaggatggatgggtggatggaaggatggatggatggatggatggatggatggatggayggatggatgtatacacatatatagccataaacatccatattaaaattatgaatattgcttgattcacacacatacatatacatacacacaagaaacatgaggcctctgagtcatagacaaatacagttcattactcacagcaagaacaacaccttgcatgagttttctaagcccaagtccttgcagggcaacatgatggccagaatggtacctgcacatgcaacggggtgcattataaaacagaaatccccaaattagaaaatttttgatcttctatagggctgttgatgatgtgccaatcctcccttcaggagaaagagaaacattatcttcattctggaatgcaagcaaatctggggaggaggacaggtttttatctttactaccctggactgtctccaggaagggagatgtctctaagcttcactatcctggaatgtctccttataaaaacgttattgtaaatgcctttgttcagagggcctggatcatgtagaaccatgaaatattcatggagaattgtcttccaatagaaaccccggccacatagagagcccaagtggaggcattccaactgatagactaaactaagatctaagcccacagccagcataatttgtcagaaacatgagtgaaaacgtcttttcatggttccagctcccagactttgagccatcccagatgatacaaaagtggagcagagctgctctgtccctggtgatccctgccaaagactgaagatactgctgttttaaacaactacatcttgagttggttatgcagcaaaagattactagaacaacatgggaacatgtccataataaatcacataagcagttcctaaacaaaatgtataacttgattacatttgcatacacacacacacgcatatatctgagtacacacacacacacaaacacatttatacaggcatagaaataagacaaacamaaacatacacaaaygcacaaaaaatcatgatgttaggccaaaatggtttgttctggtgggacttgaaatttgtactttatacacatatgtattcattggtattgttctgtaaacaaagacatgtattagttttatcagaaaaaaaaaccttagcttttgtaaaataatgtgtatacaccttaatctctagattgtgtgttcatgagcttttattcttccatcaactttctatagagagtaggcactgagcgcrtatgtcgtgatgtgaagtaattaggatagcaattaggatagcagtggaaatggtttcagacagtacaggctggtttcctttgaacagaaatgtgatgccatttttctataatgttagttaccttgtgagatgatagaacctttagagatcttttaaagaaaaaagtgttttcctatacatgaagtcagataatgcctcttgttattattttgaaacttgatattgactataatttttctatttttctctctagaagcacctggtgaaaacagatttaagaaaattctgaaaacacatgattttgaattacaattgttaaagataaatggtaaacataatttttatgtaggtttcttcacaaaatcaaagagagtttcaaggcaaaayagtcartamtaactagttatgcaggttacctggaaaacctatagttcattggactatgtactttaatatgtgatagccaaagaaatgacagtttatataggacatgataaacacacaatctatgaaatgtaacacataaatgctgttctcaatttagacagaatcatttttctgtttaaagtatggactaagaatattattaaatcaaagtgaaaacaaaagagcctatgtcttacagtcaccaataaatagttccagattcttgaaactaattagtgttaattaggtaggtacacatatattttaaatataggcattctaatattctactygtatgtaatacaaccataagttttagaaagaaataacactgcctacttttccacttaacatatttatattttccatttaaatttttttctgacttgttttatatatcagtggaaaacttacataaagaatacatttaaatattacatccactatgccttacttaatccctctggaatgaatcctrtggaatggtaatagtgaacagacactaaatcattttggaaaatccacaggagaaacatgtattctttttttattaatataaaattctggtcttttaaagtgttccacattaagtaagtttcactctgtcaaaaaaataaaactgtgctttttgctcctccattgtaataataatgtagcttggaacatgcacttaaaacattactgaataactccatattgacctcaaatcccatgaaaatagtcaatctagccagatgaaataacattaacagataattgatatgtgagtacactaatattccaagattaataacacttaaaacacatgtaactaacatactctgaaaataaatacatacaaagaggttttcattcaataatcagacctcaaatcagacatcaccatcttgaaataaaatagtttgcttgagtctctaataactgctcgtttactcatctctgcctcatactagactataatattctggaattcagtgactgtccacatgcagcctagtgcctagactatatctaatatacagcaagtataaagaaaatatttgctgttgaataaagagaaatgaaaataaagcttctagaaccgtctttccttctagatgtgtcatattcccaaacccatgttaacaattaaactcatgaaaggacagttataatacacatttttaaggccagttctatcacaatttaagaaaacacaccaagataacagtccaaaaatgttcagtcagttaaaaaatatgcaccaaaaagacagacccagggctgtgaagaatcaagggaaaagaaaatatatggggaaaaatttatcttaaatgattgctaagctttctgaccaagaagaaattgctgctaacagaaaaaaacaatkaatggataatcaaagttatacaacctaaagtcctacatgttagagtcctacatgttagacacttctatcttttctgtatgactaaaatgttcaggatgaagagatctaatgcctatggggtgatatgacagtacagtgtagtatgatatgtaagaagttctacgctggaaatgtgtgcattttggctccacctccaccactgacaattgtttggacctggagaagtcatctcacttctcaggacttcatttcgtaagactgatatgcaggatgtattcaatgatcttccaaatttctctgattctatgctagaaaccattctgggcagaagcagacacaacaaagaaagagagctaattcctcattatcctagcagagaatgtttaatatcccttatacccttagccatctgtcaatttattcaatgtgaatgacatttttattttcccaatccaaatttatcccttctctttcttttaaaactctgccaaaattcatcttcttcaagatttcttgccaaacatatctcacctttatttgatcactataatcagtcccacaatacttcaattagatatgccactccttaaacttaaacttagacaggtacttgccaatcgatatcttaatttatatatggagacctatctgggtaaatctccttacaaattatacttactataggaacactaataatcaatctactcaatactcaaataataatgtgatagaccgaacaatagaaaactgtatgcttatagtaaaacaaattcagctataagttttgaaaatatggaaagcttcaatttgcttttttcacatacttcttataatgtttgaactgttcatctactacagcaatcattcttttggctaaatgcactttcttccaaaaccaccaaatttataaaactttcagtaaaaaacagtaagaattatatcaaaattactaaagacactcatcgtcaagtctggtctgttaaagtaaggttgaaagggacaggcagtttaaagctcttagtttattctttttttaagacaaggggtccattttgtgtcaaactttaaaaaaagtcctcagctaaaggcatatatggattaccacacgttgtaagtatacttagctaagggcagaataatgccactgccaagataagtaggaaagcaatgttaatttctagaaggtaaaccaatctcctcgaacatgctacctagaaattaaggcaagacaaaagcagcttccatatcctggtgatgtataatgaaagtgacattattttatctgatacaaattcatgaaaaaggaaaatcaggctattttcctataaaagataaaaaattatataagcatcttgagcagctagcaagatctgacatgctcaaatcaatttggcacgtaagggaaattgatttggaaaagggagaatatccactttatctttctgttacaaaaccaatagttatatttaatgaaaatttacgtcaagatatgctttgaattgttaccgattaaccaacagaggctgaaatcagtggcctttaattaataagaaataacaactcagtagtttaggcttcctaaatgctgatgagatggcttggtgttcattaaacagcagtggtcttaagaggcagggagtcctgggagcagccagctgtttggatgaatgactcatcattaaccttgatgaaacaaaaaccactgtctctgtcagacattctctgacattcatctgatcgatattaaatagcaccatgtaacaggtcaatgtgttcaattgtctggggaacatctagcagctcacttatcctggcaggcatatctggagacctgcaaagggtcatcattaaggcttttgggatagctatttgtgtgccatagrtaatactttctctaaggattttcaaacacaaaactatgtctgatttgttctaacttgatgtttgaattcatcagyaatccaagtactggagcaaactcaaaattctttcttggggaatatctggtcttgatcaggtgaaacctatggggggctggccttttgtctagcctagcataccagtctggctctataatttgcataaatagaataaaagtcctaccaattgtgtgatcctgtatagttctccccttaatcagcattataaaacacctgccctgcaggctgtcttcagattgtatattattaaactattctatctgattcctaagaaaaatttgactaacataaaagacatatgaaaaaagagagcccaagccactgattttcaaaatgctactgagactagttgcattagaatcatattaggtacctgttaaaaatatagattcctggatctcatctcaaactgactaaatcagaaattccaggaatagagctcaacaatctgtatttttaacaagaactttattagtcttatgagtactcaaataccactttaagggattcaaaatccagtcagtcctgaggcacttgaggctcctctatatttgggtagcatttaacctctgtggatattcatacaacttcattatttgaagcatctgcttgattaagatgggtttcaatgtttaaagtcctaatttattttgataactatcagaaaacaagtatgtgatttctgcttgtgttaaaaaatattaaaaagacactgctagtacaccactcagcattaactccatcgccttgtaagagatgatatacattcgcttttctgatattaaaactcttttattcataataactccactttctactaggctgccaggaagctcataaccaaacagatgcctaactacagctgaactcgtctcacagtaagcaaatttgtttctgcccttctctttgatttctttcttcctttcaattacatttgtattaatcttttttggtaggttaaacaagaaaacaaactttcaaagttctcttggaaagaagcagagtatgaaaaaaaaatctcaaataacmattacagtggttttatcagttgatttaaagtcatcatccatatccatttgggcttgggcttgttctatttttcccccatacacttgcagaaatacagtaggtctagattaataacaaggtatcctccttgttcctaaaaactgcagggagatggtctctgtttccagactaaagtttttgcaacactaatttaatcaaactccttggactagcagagggggagggggacagggagaatcaaaactaaccacgtaccagtttgaaatctacagtttactatcaatctggacagataacttagacttcagccttgtggattagaaatatccagaacctatagcattagctgcagtaggtctgctggaatcaagtatcaattttaaagaactttattttattttattttattattattatactttaagttttagggtacatatgcacaatgtgcaggttagttacatatgtatacatgtgccatgctggtgtgctgcacccattaactcgtcatttagcattaggtatatctcctaatgctatccctccctcctcccccgaccccacaacagtccccagagtgtgatgttccccttcctgtgtccatgtgttctcattcttcaattcccacctgtgagtgagaacatgcggtgtttggttttttgtccttgtgatagtttactgagaatgatgatttccaatttcatccatgtccctacaaaggacatgaattcatcattttttgtggctccatagtattcaaatcacttctttctactttctgatcatgtctttctgaaattactggatcaatcattttggtttgtagataaccccaaacagataagcaactggttgactttcttcttatttcttttctttttcactgaaaatgaatagttgatttgttgttttgattgatataaaatgtaaacttggaattctgtaggcccaagcaaacattttgtgataaaartgagagtgctcatcaaaattctgaggattccaatgtttttatgaagcttttgactcagagatctgtattattagataatttagagattttcagaagtattttttcagtctgactaaagtctgacttgagtgctgtctggtatctttggccatatcagaaaacctaaatgaaaaaatgttaggaattccgataaagacagtttttagaaaatatttcagagcaaaatttgagactaaaaagtttagtacaaatattgattttttgttaaataaaaatctagtatgggctgtgtgtggtggctcacgactgtaatcccagatttttgggaggccgaggcaggcagactgcttgagctcaggagttcgagactagcctgggcaacatggagaaatcccgtctctacaaaaaaatacaaaaatagccaggcatggtgttgtgtacctgcagtctcagacactcaggaggctgaggtgggaggatcacttgagcctgggtggcagaggttgtagtgagctgagattgtgccactgaaactggcctgggtacctgggtgacagagtgagaccctgtctcaaaaaaaaaaaaaaatacgttgtttaggagtatacagttgtgcaaataaaaatttaaaatctgtgtcttttgtcaggagtaaagtgtagtttttttagttctaaacctagaataggaaaattgttcatgttattacagaccatccttcacaatcatactyataaaaaattatgaattgtacttttaaaacttgttctcatctactctggacttaaactgatgttatatttttaacctaaaacattaatatgaggaattcatgaaccaacctgtcacatgtgtcattgtttagttttgctgttgttataatcaaagcttcacctcattctgaactgattaagtagagatcaacatcaatggttagatggtcagaataaacaaatcaactgtggggcagcattatattccattttgtggaatatataaagccaagaaactgaattggaaaaaagaggaaaatacaagataattaaaaatttaattttaacttataaatagcaaatttttcatttatcctaagatttaaaaaatatttcagtcacgtgaatatgctatgactagagtaataaatttcatagaaaatattacctcctattgagagatatctctgtatgtagtacattcttggagcccttaagattacttaaaaggcaatgtcatgttgatggtaataccttttattgaccaattgaatgttgacagatacaattatagaacttaagtatatcttaaattctatactttcaggaagctgaagaaaaaatgtcttattctctgcaagcatgtttgtctataatttatagttagtacaataaaggtattatcagaatcttggccttgagattcatataactagattactgctcatctcatactctacaaaattggagaacaataatgtataccgcactgatgctgcaactatactgacagttcacaaattatagagtttaaatttatagctccctttacatctgtcatcaacagctcccaaatcacaaggcttgcaggtgaatccacctacattttttgtgttaaagccattttggaaaaaaggaaacctaagaaaactaaaacaaaggttaactaaatttccttcttttaaaaataaagtcagggcaatcctttcaattttgaaagcaaagtagtcacaattagatggatctagtcaaataataatggataaaaatgtatgtaatgaatccaactattcaaaaatactaatgtcattatttactgattaaaaaaaattaaaaattcctcaaaggtatttgttttatctcaaagccaagaggtaaaagaatgactaccaccagcagttttgtgtgtgtgtgtgtgtgtgtgtgtgtgtgwgwgwgagagagagagagagagagagagagasagagasagagagacagagacagagagacagatctactgtaagacagagagaagaaaaataagctaaattaatttttgctaatttaatttccattagaaggagaaaatgaaacatttttccattaatataatgctttttggtgacgacaaacttttttttttggagacagggtcttgcgtcggctgcactcaggctagagtgcagtgttgcaatattggctcactgcatcctcaaactccccaggcttaggtaatcctcccgagtaggagggactacaggcatgcacaaccatgcccagctaatttttatgttttttgtagagatgagatttccatatgttgcccaggctggtcttgaactcctaggctcaagtgatccagcctcagcctcccaaagtgctgggttttataggtgtgagccaccacatctggccttttaaacaattttttaatccggaaaggtttaatacaccaaaactttgtgaagcctttggagaggggtcttacctccagatgacagttttctcactgtaattactaagaatttaaattttcatttttctgaaaatactactgaaaggtcccaaaagcctgttaatgaccataggccagaaagaaaaagaactgaaatatccatttctcatttatcaactaattctgaaaactttaaccaaattacaaaaatattttaaggataattcagaagatatgaaacttgtcaatctgtttaccaaatatgtgtctattataatatccaaatgcctawagcagattcagaaaatatgggaaaacatattaattccaatcaacactattatattacaagtataaattatgtccacatgacctgcatggtttatttataaaatatatattttaagtgactaatatgtacaacattaatttgtatattagaagtttttgacatctctagcatgcctgtattttcttaaataaactgtgtgcatgtatggataagcaacacatattacactcatatataaatacatgtggatttttatacttttataaaatcccccagtggggattcagaatgtctttagagaagacttttaaagtcaattttttttwatatattttatttatttttttttagaaatggggctgtgttttatacttttataaaatcctccagtggggatccagaatgtctttagaggagatttttaaagtcatattgttttatacattttttatttttttttagaaacagggtcatgctctgtcacccaggctggagtgtagtggcacaatcatagctcactgcagcctcaaactcctgggctcaagygatcctcccacatcagaccccgagcagctgtgtctatagatatgtgctcccaggcccggctaatttttttttttttaattttttgtagagacagggtttcagtgtgttgcgcaggctggcctcaaactcctggcctcaagtgatcctcctgcctcagcctccaaagtattgggattataggtgtgagccactgtgctgaaagtaaaatttaatagaaaaaaaataaatttacttttgcattctcaaaataactaaatcttccccactatttcagtgcctataaagatctctgaaaagaccttcaggtcttttgtgaacatattactttattttagactttcaaggacatttgtacagcgaacagccttggaagataaagatatctttctctagaacaaagagcaagtttgagtacagccttagaaaataaacgtctctccctaaaaagcagagagctggcccacttacctcctcatataaaaaattcagattcctgaagttcaagacccacctcctataacgcctggccctccacacattaccctgtggaaactgggggatcggagaaccagcacaaattctgatactctggctactgctgttgctatgagtaataaactgccctttttctctgacctgagtcttaaatcctctgttagaatccatgatccaatggctggcttacacattagtttgcaagcagggtaacatttcagaccctccacagctcttgtcaacctccaaatctcaggggtttataataacaccagtttatttcttgtttccttacattttactcactttacatgttggtcatgggtcacgggggatcagcttagctctgctccacacatctccttcttttggggatccaggttaaaagagcagcccccactgggacatgtttgttctcatgacacaaagaaaagagcaatggaaagtccacagtatgatttttcaacatttttgcttggtcatggcatactggcagacttacatggaaggtccctaacttayaawggtttgactcaggatttttccactttctgatggtgagaaagcaatatgcattcagtagaaactgtactttgaattttcatctttcccccggctagcaatatgctatatcaatactctctcaagatggtggcactctctctcaatagtggcaatgagccataggtcccagacagccacatgatcatgaagttaaaacaaactggtactcaacagtatactgtgtggccagatgatttttgcccaactaatgtaaatgttctgaatacttaaatattaagtgctaagttcaatgtttggtaggttaggtattttgaatgtatttcaatgtacgatattttcagcttatgatggttttattgggatgtaactccatcacaagtcgaggagcatctgtactctactgaccaaagcaagtcacactgataagcccaatatcaatgggatgcagacatattctcttcccacagggagaattgaaacagtatcaccccaaataggaagaagtaaggatgcataacatacttacaaagcaaaggagtgtataatagaaacaatacattctaccccacgtaacacatatttagaaaaagatagttatgtaggatttgttatgttagttaataatatagctaattgtattagtgcaaaatcaaaaatttgaaagacccgttccatgtttcaaaagtttctaatgtcttgcattatacttatgataaaaagaaaaataccaaagttcagtgattactttttaaaacaagagtagaaatgcatttgatgagatgacatataaattgaaataaagttagtactagtgattattttttaaaacaacagtagaaatgggttcaatgagatgacatatcaattgaaataaaggtagtagtacagttggtatgaatgtgttcaaatatacacagggacacacaagcatgaaaagaatatttttaagagtaataaagagaactattgctgctactattaatagaaaaatatatttataaagcaaaggtttgaccaagccatcatttaataatcacaactaatgttccaagaattatttaaagagtatgtttagcatctctcatgctcccttttgaagttttctgttgttgttatcaaaatcaccctgaagaaacacagagtgcaaaaagggttatttcttattttttcttttgaattgttttagatgtaatcatcctttgagccatcttttcatcaaataatctctttgaacttcttacctgtgtattgccatatgctagacacgctgcatgaaataaacatgctttactttgaggccaatgaaccaattaaaattgtctacttatgctatattcctaatttcaaatcagaagtcataatttcaggattccaaaaactatgataaccactctccattctaacaagtcttttcttccctgattttctcttcagtttaacaatcccatgtgctgtgatccattgactacatccttccttttttaagtggctatgctccattccatagatatttatctaaatatctaaatatttccccactgtcatgctagctacctgtctaatattatttaggatgttcaaatatttaactattcttacccacttttaacatgtttttaattcagtatttaaaatttgtatatttaaagataaactttacytattttctgtattatttgtaaaagattatacgtgtcaggaagcrcatacatttgcacacacacacacactgtaactatgcttattcattcattgttgggtttaataagtattaattgaatgggtgaaaagatggattctgacaaacactaaattttaaacatcctctaaaagtaaataaaattaagacggacttttctgaatattttcaaaaagaaatgtaaatatgtttcctgcctttcagcttttcccatcttgcctactctccagtgttagccttcatttcgctcttaccaactacatttcatcaacatttactctgagttctatatcttaattataaaacattgtttgaagctctagctatggctgatatatttttaccttacaaatgctattctcttgaacttcctgctggaagaatcttagtaacagatggtggagcttctagagatagattaaataaaacaaaactttgcatatcaatacaaatctgacaagtgacttaatcacaaaagacaccctccttcaaaaaacaatcaggtaggcagcaccgatgaaccccgagaaaagaagtcactgtagagataccccttctgtatttttccctattcattaatcaagcagcatttaagacagcttttcatttttagtatttaacctgatttcagctccatttttaatgaggaaaattatgtaagaaccctacctttattctccaaactaattttttttttttgaggagaacatggacatcagtatacttaagtataggctaaaaattgatacaaagcagaacttcttcagaaattctctaggcatgtcaaagtacattcaggtattgggagctataggagtaaaaggatacagataaggcaaaagtatctctgaataacattaactaaaggattctgtctagcaaacagatttctatgacctttgagtaataatttaaagacatgattgacattttttttcccatagcaaagcctgatcataaatcttatccttgagtatctattacatttgttgttttggctcaggtttcaggttctttgctgttactctactttaggaaatttctaattggggtgaagagaagaaaagattaaaagaactaccaatttcagcacgaagcctcggtgacagaaagagaaatggagataggaataatcgcataaaatctggtagttggttgtggagatgggagtgagttttaaaacagcacaaaggcgatggtttgagaacattcagataagagggaagaggcaagcagaaggaagatttttaagccacagagatcagagaggacagggtattccaggaactcagtaccaactggcttccctgtgccacctgagctctctcagggttgctcttccctctattgcttcactcttggtagcacatcagggcccatcctccccactgtgaaacctccctagtttaatctgctcttcctcagagtcataactctcctccctaaaatgacaatttgttaatcttaaaaagtattccacgcttggaaaaataacagtaaagttcaagttaattactcttttaaggatatttacattttaccaaaggtttccgagagacacaaagccttgaacccaaaggagtaaatcccaaatcttgggtgtttgttatttagtgatctgtttgtggaagattccaatgtttcctaaatctaagcatacacacatagcttcagttctgcttcagtactgccatggctgtattttacaaaatgttcaaagaacacgaaatacattaaaagaaccttaagctataattaccaattgcaaacacagtggcagattttcacgtacaaaaaatatatatatacctcaatatacactattggttaaagggaattttacacagatgaaatcttttttattcacaccatcttcactcaataacttatccatataattatcactatgcacttgtattagtctgcttggggtaccataataaaataccacagactgggtgacttaaacaacagaaattcattttctcacagttctgaatgctggaagtccaagatcagagtgcctgcatggttaggttctggtgagggctctcttactgacttgctgatggctgccttcttgctatgttctcatatggcacagagctctggggtctctgcctcatcttataagggcactaatctcatcatgaggggctccaccctcatgacctcattaccccgcaaagttctcatttccaaatatcattacattgggggttagggcttcaacatatggatttcagaaggacataattcagtgcatagcagtgagaaaatgctgccccaagtccttaagacaattctacaataaaatgtatgagcaagaaagtttttaaaattaaacaactaaatgtatgaacaataaaatgtctttatgtatgtggggacctgaaagatgataaataacatgactattaccaagaaaagtcccacgtattttttttttgataagtttctgtgaatttaactacccttgagcatctctcttctttgccctcatctctagatttcaccttggatcaggttgaacagcagcaccattcccttagatatgaaagcagctgccaatccagctcctccaggcctttgtttgaaaactctttatttcagtaggggagcctcaagctcttacatttcaaaaataagcatgactacactcaaatgccattctctgaagctggttgatttctgaaacgcctgaattcattatcctcacatggaggtttctgatgctgacatttctcggcctctccatgcactgctcagtcatggtgttgtcacccccagaggtccccataggtctttagggctccagataaaagtaatcaacatagggagcaacaaaacagcaattaactgaaggcagctcaccttcagagagacgcaaactcaagcttcaaaaagtttttatctgtagctctttttattctgaataccaggttcttgtgaggtttgtgtgtgtgtgtgtgtgtgtgtgtgtgtgtgtgtgtgtgtaaccaagctgaaaattcagtgatacggagagacaagcatgacgtattagatgagcaagactaactaaatcaagccgagacaaagaacacctggtgtatattattttgactaaggatttcttcgtttttcttatttcccaagcccatttttctgtttgaaacaaaagaggcatgaaatttatagattcagtaattacaggaatagtaattatgttggatgaagacaaccctttgagctagtttagcgataagcaccaaaatcaatcaccccaagtgtaaagtggcacagtaggttatatttttataattgtgatcatcaaatccaggcccagaggctggggggttcaaatcatagcaaatttatcacatattttattccaacctgctctagtctaatctagacattcattaaacttttgagtgtcaggccctgggctaggcaaaggagacatacacaaagattactaaaacattttctatctttagaaaatctctaacagtgaaaatatgaactggcattgggcaggcattgctctgtttacataagaagtcagccagcaactgtctttaaatgaataattgcaatgggaagaatactccactaagcattgtatctggtgctttttacacatacaattttccttgaatccactagcctgtctccattattctttctacaatctaatcaatttcttgttctggaaaacagccaggttttaacagttcctgaactgaatgcaaaaagaaacctctgaaaaaggaacaaaatttcttgaaaaaaattaaaacaaaaaaaaaagagggagactccaattattttaatattctcttggaaaaggaagctttaagtttttctaacacaagaatatttttctctagagaatgctatcacttttaccagggtgctcatttttactatataaatagtttcttcagyttttacttggtcatacgcaacagaaactgtaattatttgttcccagagttcaggaaaatcaaccaggtagaatcaatttcaggtggggctattgaaactttctaataaaataaaacacatatttaattaacacactctttcatttctaccatccaatttctaattaaaaatctgattctgtaaattcagattatttgaaaatcatctgaaactaattacatttttaaaactcaaccaataaaagggcagattatacataagtgcaatagttgtaaataaagtcaatagaaacgagaacgtctaatctttagaatgaaatgtctttttagttagttccactatatccacctaatcaacaattacacacatacgtgcacttacatacacatacaacccacttcctcaggcattcacaacattattaaactgtgtttaaacagtatgtgaacacagacaaaactataggcccctataagccagtgtttcttgaggcatggcctggccttgcatttgaactgtattagtttcatttggggaatacttgctgaagtacagcttcctgaaacccacacaagttctactaaatcagaatctcaaggaagccagaaaatctctattttttacaagctcctaaggtgattctaatacacatgaaaatttgggaaacagtgctataacattttagtcagggacaacaaagtttctatttagatactcagaatgggatgagaagctttggctccatccttctttctactgtcctaagatttctttcttcccatggagatagttttactactagatttcaggccatcccgtactaaattggactttgcctttttaatatctctttgatatcttgacaaatatcttgtagtcctgctattgccctgtagataagacaataatttcttttggtgtccccagatatttctaccattctacccctcctcctagtttcagccagcctgttcagctgacctatcacaaaagctctgtgctctgcctaaaggaaactttttatttggtcctgtttctccttgttctgtttgctttgcttgaatcaccatctatttttaaggtgatatccatctcatcctctttctgaaaagtgcatcatgtcaggagccttcttccaatctccactaaccattttaagtgcatttcattctcttttttccaaagatgtcagatgtccttcttgtatactttccactgacttcttatttctgaaccagaaggcatcgcgagtgctaaactcactcacagaacagaaatttgtttatttatttaacaaaatgtagtaggtgcctattatgagccagccaggcactgtgctacagcagtgaaccaaaaggacaaggttcctgacctcatgaagctcaattttctattggaggagataaaaatataaacatgaataaagaaataaaacaagatagtcatagtagctagaagcaggtgtgtgtgagtgtgtgtgtgtgcacgcrcatgtgtgcgtgtgttccattttgttagatgcacagaaaaaactcttccctgaagtggggaaaataaagagccaaccacacaaagacctaaaggaagagaattcaaggaagaggatctagctaggacaaaaggcctttcacctgttcaaagaatggaaagatcagagaggtgcaagcacggaaagggaagagatggagaggccatacaatgtgagggccctaaaggccatggtcaagggaatcagagaaaacttaacgcttttaattctaatagcaacaggaagccactgaagtgtttcatgtaggctagagatcgggtttgaggataactgtaagataactgcagctgccacagagacgctgacgtttagaagatgaagaggggaagcatgcagcccagttaggaggcccytgatgacctgaatcagtgaggcagcagtagagatggaataaagcacgtgactctaggacgttggtggaagagtaaaaggccttaccaggcagttgagggcaataaaaagtgagaccccaaggatgccgcctaactttttgtcttgagtaactgggtggatagtgccatctactgaaatggaagaaatctgaggaaagaagatggaaggagaaaggaagggaatgaagaatttccttttagacatgttaaattcaagatgtttcttgaacatccaagtgtgataccatctggagatacgaatctgagcactgatgcatgaagacagcacttaaaaacacaggatcaattttcttagggagggtttaagtatggatgaacattcaggatcaagctcaggggcatgccaaaatttagaaatctggcagagaaggatgaaaatgtaaaggacgcctagaaaaaggactggttatttgggttcaaggaagctaaaagaagaacattctcaacatattttaaaaaggaagtggccaaccatatcaaatactgctgaaaggctaagatggatatttggaagagatcacaggttttggcaacatgaacgtgatgctgacaaagaaccaaataaatgagtaatctttcaragcccaggtgtttagctgacctgcaaaagaaatattatggaaggtagaaaggtgaaaagaaaaaagaaggggatgcaaagaaaattctaccacagattcagaactttaatagttcttaatctaagataaactacagtgagacatatatgttgcaaaagtatgaaaaacaatatagtttttttaagtatgaaatactatctggcacacatactaaatttatctaaacaaagacctcagaatttagtagcacaggataacctatttattgctcctgattgaggaggcatagtagatttttaaaaagacttatatttaattacttaacaaagaatagccaagcaaagtctacaaatacactgctcctatatactgctgctaggatcacttatctctcctccctctctcatggcaaaggctccaaacaccaatctcctgtttgttaaatagtgcaaatcaccctttgtcattttagttgcactgaatttgaatttgcataggttgcaagtagagaatagaatcttgaagccacataaactaatcacacttagtcttaaaacagaatatatcggatatctagccaaacaaaactgctcaagtacccaatacatattctaaacacttccacctccatgcttctgctacctggctttctacttctcgaaagttacttttccacttgtccttaagtcgaaatcctatcttttcttcaaggttgaactgactaatgcctttgaattctttcttgctagatatcacttctaagaacttcatgatattgtacctctgtctctggcttttatactttttaccttttattatatgacattgttgtctattcttttgtctgcctaacaccctgtattatctgggaacaacaacccctttccctgtactggcatcaacaagataaggtttccatggagctgccataatttttctataacgctgcccctaggccagaattggttggtctacaggtagatacctgatccaaactatgacaaccacaatattccagcccttgacaatgattgactcttccaggacgggcacttaactcaagctaggccaatcatagtcatttctcaactagatcctgccccactggtcatagctaattggtgcaggactggaactggatgcaagctgactctctggattgagaactagaggtcagaccattccctgtcccatgtctgaaactgaaatatgcagcactggaaaactgctcatgctcatggccatgggatcagccttccccttagcctcagaaggccttggagtggaagcaacaggtatctggtaggggtaaatgccacctctttagtctcatgattgaaaccaccttcaaagcactattcaatgttgtctttggagacaagtgaagtgacttgtgatatttggggggagcccccaccacaaaaataatttctctctctgctaggtgatttcttccattttattattattttctttttatggtgatgttgaattgaggagagatgttcctgctacatttattaaaagttaaaagaaaatcccagcaccttgggaggccaagacatgtggatcacttgaggaaggccaggagttcgagaccagcctggccaacatagtgaaaccgtttctgtactaaaaatacaaaaaaaattaggctggcatggtggcgcatgcctgtagttcctagttccagctactcaggagtctgaggcacaaaaatcctttgaaccagaggaacaggttkcagtgagccaagaatgtgccacactgcactcaagcctgggagacagagcaagactctatctcaaaaaaaaaaaaaaaaaaaaaaaaaaaaagttaaaagaaagcagcatttgttggctgggcatggtggctcacgcctttaatcccagcattttgggaggctgaggcgggtrgattacctgaggtcaggagttcgacacaagcctggccaacatggtgaaaccccgtctttactaaaattacaaaaaaaaaaaaaaattagccaggcatggtggcacacacctgtaatcccagctactcaggaagctgaagmaggagaatmccttgaacccaggaggcggargttgcagtgagccragatggtgccattgcaccccagcaatgggcaacaagagtgaaactctgtctcaggaaaaaaaaaaaaaaaagaaagcaacatttgcaagargtgatattcatctctctgtctctctttttctgtgaaaggttactaratttcctccttttggggagaagtagaaaaaataattttgagagcaggagagatctcccctcttaaggaggggctactacttaagggggtaaaaaaatcaggggctgagaacacagaatgtatgatgagttttgaagacaatgtattttactctaagcctacttcactttcaaccaagtggaaagaatatatagggtatttttttgtgcatatacaaatgattttgttttgcatgatttgtgatgtttttggctggcttttaaacaggattggagtaatataaaagcacattaaagcagacatattaggcaaaggatcatggtaatagtctcatggccatttgggggaatttcaggaattaaaaacagagaatgctgtaaataacgttattaagagggcagtcttcctgaacctaaaggatgggaataatatatcaattttgggtagtctctatatacacaagtatatcctacttaaattctttccataatggggcatcctcttcataatccrtcttatgatcaaataccaaatttactttgatgtgacaaaaaaaaggtattgtgaataatgaacttcaaaagaaagagcagtgagatggttaggggtaatcatagggtggagaagaatataataaaatttcacattaatataatattattataccaaacatataatagtaggaagattttcttgcaataaaacagtagttcaaataatgttcttccatctaaaaaaatacttcttaaggtggttgctttctttaaattaaaatatagagaaatattatgtgactataataacatcagaacttactctttaaaatgtacctaaagttctttataaaatatactactgtgactcaacagtgtaatactgtcttagtctgcttgtgctgctataacagaatgccacagattgggtaatttataataaaaaatatattgactcacasctttagagactgggaagtccaatattaaggaaccagcaggtttgatgattctgatttcaagatggcaccttgaatactgcatcctctagaggagaatactttttccacacagagcaggaggcagaagggcaaagaggaaaaaggggactgaagtcacccttttataaggcattaatcccagccatgagggtggaatcctcatggcctaatgacctcttaaacatctgacctggtaatactgttacaatggcacttaaatttcaacatgaattttggaggggattcaaaaagtcacaaatactacttgaaaaaatataacggtttaaccagtaatgcccatctgggcaaaaaagctatttaagtaccatgcactttgatgaatgacstttaaaatagccttcctcattttatactattacttttcagtcagtgcaggataacacattaaatctaaaaacaatggcccagtgaaaccaagctagtagatttaaagaatccattaatttaatggtaattatcatttcctattcagcacatatattttctttgtttgaaagactatgctttgtttttgtgtttgtgttttttttgtgacagaagaatgcaatacagtgttttaaaagactctgtaccaaatattttgtgaagtagaatttctccttgactagagtctacataattccataatgacttgtagaaatgacataatttataatctcattaggtttttgtgaaatgaaacaatttatatgaacaacccaaatataatcatggctaatttgagaggaatgtttcatttgcctgcagcttcccagcaaatactaggcagacagagtttaaagcttcagtggggaataggcagaagcatttcacaaaaaggaagatttaagcagctttgaaaatggtttggtcgaagctcttcaactgtaaataaaatcactggaggtctaagtaaaacttcagcctaatgtagttgtcagtctaagtaggtcctagttaatgactattatttttatgaaaatcaggcttagtaatcaaaaaagttcaatattccacaacttgatgaagccttatagtttcccctttctttccactgagtacgtcctaatttaaattgacaatatcaatatacttattttaatacagtaacttcatttaaaggggagatgaatgtaacttgaaagtagtgtgaacattctatatcatttcttcaaaaaaacggatacatttctttatgaaaatatttttaattaaaacatttatttacaacttcccacaatgtgttgatgtattgaaaatattttaattttgaaaaatatatatttgtgtacgttttaaataataatgacaaagaaatttttaaaacatgcttttctatcagatggtttaccaaaatattcgcccttctatgtttccttcttttagcctctacattctgggaattgtctataccttttgaaacatgcgagaactttaccaaaaaagagtagaaaaggctggtgaaatgagtggggggttagttgacatggatgctaagtgtaacagaatggaactttgacactttgatggaatatttgcctataagcttaaggagtcatgaacaagactggattgccactcccaatgtcagggacaaaaatctaatcattaccaggcagcacaattctcatcaggtagccaagactgctgctcrtgcttaattttaaggtttgacccaccagagataagcatgaagttagttcagtattccagctggtgaatttctctgacagatgtggtgagttaatacgagggagcagaatctaacagacatcaaaccaattattggttcctaaggactcttatgagtcaatctacttcatatttttattactaccacctttgcctaatgcctaatcatctcccatttgaaccaatagtattatcaaataattgcattttctacctatatcccatttccaatctaatctttcattcataattttcccaaaccagtcttgccaggatacctctcataacttattactctcctgttccaaaatgtaaacggctttttagtcccttctagataatgttcaaatttctgactttcctattaacagccagacataatcagtcctaaactaatctttctaaagttatctattactaattcactagggtcagaggttggcaagctttttaaataaagagcagataataaatattttaggatttgtgggatataagtctctcttgcaagtacttaactcagccgttacagagggaaagcagccatagtcaatatgaaagccagagtgtggctgtgttccaacataacttcttttatacagaaataggaatgggccagatttggttcaagggccatatttcactgaaccctgttctagatgaacctttgctgtgcagaaattggccattagctgtgtcatgaaacagctgttaaactctgttcccagttctgggctacagggatacaaggatgagttagctcccatagttgccttggcaaagttcacagtcttttcacacacagaatcactgtgcaattatactgcaaatgctgtgtggggtaactggcttagtcagaagcaaaacttcatgttagagtaggtctgggagtagtcattgtccagattaaggtgggcaggcacaagataatgaaagggagaaaaaaatgacagcctgtgccaaaatacaaaaatgcaaaaccaaatggtgaatttatggaatgatcaaggcataggcaggtaagacggatctggaaaatttggcgggagacaggatcaaaagggtttgactgccctgctaatgactttacactagctattttgagccagactgcgcttaggcctcggcaagaggcactacttttttggtgcctgtgtttttgagaaacctgcacatcacaagttttacaaaaattaagtttattaaagaacacatgggtccctatgccaatcaagatctggcattcagcactagcaaagtgtgacattctaactctgattattcaccaggtatttactcataaaaaactaacaccattaaggacccagacatatgtttttccatatattttatactctaaaaataaaaaacaaaaaacaaaaagcacaatggattgattccaaatgccatgaaacttcaccagttgatcacaggcaggatttcagccatctaagcacttagcttagaagtgcctagaagaaggaaattaaatgacctgacaagctttctcagcttggaggccacagattcttgtacactcagtatcatttgccagtagctgagtgcccctgtcctgttctttctgctcttcatgtttcaacttgtgattctagaattctagagatactcaggaaaacacaatattcaccacagttgtgcatggtgacagaggaaacatttgtgactacttaaatttacatgtatgtagttgagggtatgaaatgcatggagcatgatactctttacattgacaagcacgtagaaattgaaccctcaaacctatraatagatttcctttcataaaaatatgtaataaaatgtaattaattctttaaatacttacaaattcagttctatttaaataattttgatgtaattttatgttaatatttatattttgacttttggtttgaaaagatacattttgatattttacaaaaaatcttttggaaagacttgaaaaaatttacttttaaatttttacacttattttcatctacattttcattaacatatttaaattatctatactaaatacagttaaatattattttaatccttcatatcattcactgttgtcaatagaatgcatatcatgtgaaaatcttgattataacaacatagtgattgctgaaatggaggccagaaaaaaaatgtaaaaatgtattttaaaaaactgaaaaataacagcttggaattttcatttagaatatatatgtaatttaacgcttatgtatattttaattttattactcttccaaacatcacagacctttcaacagaatactcaagtgtgtaataataattaaattcagtcatctttgctggttttagccatatggaggtatatttatcaagttaggaaaagtaacatatttcatttaacagtttgctaacttaatttatagttaaatgttaaatatttagacatgtagtatttagacctccatgccttaggcctcacatatattaggggacgatctaatatttataagtaatgtgaagtcactgatgtcaacttttaatattttcacttatgcagttatgagaaacagtctgttatagcaggcgcggtggctcatagtataatcccagcaccttgagaggctgaggtggatggatcaattgaggccaggagtttcagaccagcctggtcaacatggtgaaaccctgtctctactaaaaatgcaaaaattagcctgctgtggtgtgcacctgtaatcccagctacttgggaggctgaggtaggagaatcacttgaacccaggaggcggaggttgcagtgagctgagattgtgccactgtactccagcctgggtggaagagcgagaatctatctcaaaaaaaaaaaaggaagtattattttatattttatacataaaaagataaagcataatgtaatgaacatctgtatgctcccactctgcttcagatataagtactgtaacttggtgtctttgtatactcactcttccccaataacattcattctcatcttttccagaggtaaccaatcctgaattttttactgctattttaaatggccaattctttaaaagtatgttttctatttcttgatatctagtcatgtttcaccatgtatataatagctattatactactaagtttgcataattgtcttaatagttctgcagattcctcttgggacttctaagaaggcaatatmatacttacaaaaaataacagtttggaatcttcatttcccattcctacatcttttatttctctttcttgacttaatctgcactggtaatgacctttagcataatgtcaaatacaagtggtaagagagggctttcttgccttgtttctttattgaatatactaggtactgtaggttgataatattgttgttaggaagcaaaataatgtgatcaggattcttttcagaaaaatcattagtgacagaaatatctgttggagcagaattctttaggagtcatattacaaaaataacttctatttaatgggaaagtcatggggcctgtgatgacctatcaatagaatacacattatggctctgattctgatggctatagtaaaaaactgcatttttgcttacttgattcaccaagttagacaaatcttaatataccaaaaactcacatgagtcttactatgaataatgtctaaaagtgtagttatcatgattcactacagggtccatttatggctcctttatgcaaaaaagatcacccacgttactcaaaatcaaactgatctttttcaaatacaaccaataagatactgacacagagcaaagtctttttaaagattacccaacaagttttcagaaaattaaaaatttccaaaaaaagctgtcttccagctcagtcaaaagaacgttatttacgtagtttggtgtttgcaaagttatttacatagcttgctatttattaaaagaagtggagagtaaataattacccatcaaatattttataagtatatatccatgtaaatgaggcaatttaatctcaaactttgaatctcaatatattcaatagtagactttttttgtcttatgggcgcctcatattttccattttatttttctatgtacactcagttatgtaggcaccaattacatcttacaagtaaaataaaggcttcaacctcactttaaaaaaaattctaagcacttatgaaattgctaaattaataacccstgcatatgtttcactaaatcttggctcctgacctattatcagtaaatatatatttctaataaaatgaatgtgtttaattctgtaattaaacggcccaaaggaacagtatctgygatagcaatgaagtctaatgacaattctgctgacattcttctatctaaaaatgaaatcatgtggaaaatgatttctacactagcagaataattaagacataagacaaaatttgatttggtaggaatggaagctaagactgcctcttctcttggggagatgggtgacattatttatttcaccaccatattatgtttccaagctctctttttaaaatcatatatatttttttcatgtcttaattacagcaacaaatccaacaaacaatgaagctaatcttgagggactttctgtttcattttactgcatggacatttcttggtgttgaacacagcttctgagaatgggctctcttttgagacttagttatctttggttacacaaatattttcattataatggtatctcctttaagtggctttgatctttttatgagatgtatgcctttgtctataccagtcaaatgaaaattatatctaggtaaagcatgtgaggttgccaggttccagcactgtttatgggaaccatgagaaacatttgatgaaaaaccacaaggtaaggctttatgacttattaacaaaaaccataaaactattgttaccaatatttttctataaaatacagattattttagttcctatcaaaattttctaaagaataagcatgtactacaagcaacaagaaaatataaccaattaaagtctaagcaccattttttcaaagaaagtgtgaagagaatacttcatttggatcctgtcaacactgtctaatgaccttttttaaaatttgaaatggctgattttaaataaaagctattctagctgctctagagaagttacacaaggaaaatgctacaattcgacaataaaaaatgcaatgaaaattcattctcgtgtatcacaagattattctgtattgtacaggcagaatattttcaatgcagctgaaacccattaaccactctaggcataaatcacttcattcacaaaacatacagcatctagagtgctttatgtaatgcaggatttttaccaaatagttattttcactgatttcagaacactctgttctaccaaatcctcctgggagatttcatgggttttcatacacaaatgctctacttctcgaagaggctctctcatacccccatctagagtatttgctacaatgtgttgtgaaggactgattgtctccctcccttccatccttccttgagagtggggattagaccctagtactggtagcatctattgaccctcttacctgccccttctaggcatcaggttatgttttaatgcttagtgatagtggcaaaagaattcagaaggctcacaggttcagtgcactcattattatctatgacctgaatctctgtccttaaaatctctgactactttaaacatttcccaaaactcagtcccaattcctctctttgtcaagtgccttccttccttccttccttccttccttccttccttccttcctttccttccttccctccttcctctctccctctctctctctctctctccctctctctctctctttctttcttgacagagtttctctgttgtttcccaggctccggtgcaatggtgcaatctcagctcactgcaacctccacctcccaggttcaagtgattctcctgcctcagcctcccgagtagctgagattacaggcatgtgccaccacacccagctgatttttgtgtttttagtagagacaggatttcaccatgttggtcaggctggtctcgaactcctgacctcaggtgatccacccgcctcggcttcccaaagtgctgggattacagccatgagccaccatgcccagctgtcaagtgctcttaatataaaaagtcccattctttcatccttcctgcaactccaagaatctactgtttttttttgttttttctttttcttttgttttttttttaaccaaagaagcattatataggggaaaaaatcaaaacaggtatgactagatactaaattgcttaaaatgtccatttcccacatatattatagaatctagtaatctctgcctggttacatgtaactcttatttctcctgacgcatcccacccatcaggttccacaagccaatatccaggtgggcaaatcacaggtgctcaaaaatgtgtcttgaaggcataaatgaaaagcttcgcatgatttaaaaacataaagtttactttttmtcctttacttttcactggtttttaaaaagtgaacatttttttgcgctttataaacttcaaaaagaattctatggaattttaatattcatgtttcatacttttctaaagacataaactttacttttctactttacttttcactggtttttaaaacgtgaaaaattttttgtacttcataaacttcaaaaggaattccatggaattttaataattcattttccacagttgtctgtttatcatcactttcagaccaccagttcatttcattaataaataatagttctaatgctcatttattgctaaaactatcatctcctattaggcatatttccttcacaaaacactctagggggctaatgttttatctaataaggtatcaatgaaaaaagtgattgaattagctcttttccaaatgacttggaactaaaaagaactcatattcagtataacttgaagtttccattcttagaaagaggcactctatcataaatagtttctgcctctgaattattcagttatgtttcatattccctgcatacaaattgttcacaaggtcacactatgatcacaaacctaaaaatcaaaatacatttatacatcttagaaaggttatgtttgccttgaaatgtataagccaaaagttcttcttctaatgtcctttggtcaaagtagctaaaataaattatatattttaggtgttaaataaataaataatttactttagatttatttttagatactagaatttcacaattcactatgcaggaaacagtgaaagtatctcagttgctctcaatttaaagctagataaaaatgatagaaaaacttcaaagtggaaagtgtacaagctaactggaggccatagaaagaatcacatttgtgttttcagtaaatggaacatattatctaggagaacagttcaaatataattactaaaattaatatttataataaatgaaagaattgctgcaggcatttttaattgaagagtcaattgaagagtctgtcagtgtgaagtagttaaaaatcactattagaaatgtcacagttatatatacatacaaatacaaatacaaaatttactttttatgtgcttccatcttaaagcaagcagaaaatttgtcactatctgcaataatcagttawtttgtgtgctggtgaagaacatcatggctacaatagaaaatgtatttatctacacagaagtaggtgttgtaaaggaaaagacactaatttctttcacagagaaagaaattactgagagaaatgcttagaaaatattctaagcaactataaagcaacacattagaatcaccatgtctttatgatataatccagtaaaatccagtagtaatatgcactgaacaacactaccagacaattatcacaattttaaaataaacttatgaaagatatttatcacactagaaatgcaaactaaagtcgtaaattggcaaatccatatcatgggacgataggacattttccatcattgtgcaatgatcatatactcaagagggttagcataaagatatttcacagagacatcacacgcaatggaaacatttcatacccaatcatatctgtgatgagagagacataaaatggcttttaggtaatctttttcacttgcgagttgctacaaactttgtcacaagagacacttctatactgtaagtgacctaaaacatttccaatctgtttatttcacctttagtataccttacaaaaattagattatatttttgtaataattactattcaaaagcaagagaaggccttagtagtatttattatcatcattgcaactagaaaaaaaagaagtaggagtagtttcctaaagtcatcttccacacaattatatatgcttatccaactctagctctattactgtactgtcagccaaagatgagtcaaagtggctgctccattagtgacagcaggagtgtgccctcatactatgtgaaagaaattattttattagagaccaccgacattaaattttagaaaaaaactatatggataaaattttttcacaaacatatctaaaggtattcaatattaacttatacaagttgaatatcccttatccaaaatacttgaaaccagaagtatttcaaattttggattttttttttatttcggagtatttgcactatacttactggatgagcatatctaatcccaaaatttgaaatccaaaatactccaatgaacatttcctttgagcatcatattggtgctcagcaatctaagaattttggagcatttcagatttcagacttttggattgggatgctcaacttatatatacgttaaaaagtatagatatgtctgcctttaggaaaatgtaatgagtgaagatccaagcttttaaacacactagataatgagaagcaggtgtagtgccagttaactcaaagattcttcactttatattataagctattgcagggattcataaatacagactttctgtatacattcaacatgaaaaaacccacaaaataccagtttagtctcaattctatggagtacaagcatggaatgaggaacgtctgcatttctactatacactcaatgcttctaacattctacttataacgggtgacagatttatgccactccaaaatatgccactttgacgtaaggattactttaagctaaaggcacttgacaaacagcagatgtaagaagggcattctaatctttcccttttcttcctgaaagcaggagatacaatttttcatgtgaaagatgccttgcctgtaccaggaggaaaaaaaaacattattccatgggaagtcatggcagggggcgcagaggggcttctgtacaaacacaccttgttaaaatgtgttaaaataattatcttcctttagcctcaccacataatttagtcacatttccacaattaggtctctttgttcaatctaacataaaagtatgtacgtttttccacctattgggtcttcatttctttatgagggctcctgcgccacctaaaacttattttaaatttgtttgcttttctcctatgactctgtcttatgtcaaattaattctcaggcccagctgggaccctaagagggtagaggtaaagtttgcttcctgtacatttaccaatatgatttctattacacttgcattttaaactaatgatttagaaaactgatgcctataggtcttgtacacattgtctgctaaacatcaactgaaaatataagctacaaagtattcccgtgggagaaaaaaaaaatcttccaatttrgaataaggtagttggccaaaagcattttttggtactttgttgaagtgtctgagttttttttctaagaaacacacgtgcacacacatacctacatacacactctgatagtgtaccttatctatgatacttaaaaggaaattttcaaacataaactattccagtataaatttcatgatcagtcttggctgagttasctgaataacctatctgacatagttttgttctcacctttgaaatccaattacatcaacaagaagataaaagatgacttaccggcccaaaagaattactgtcaaaactgtgtccatgatgatcrccttcaacccagatgtgaccacrggggactttgacataccggtttttgtgtcctatggttctggaaataaacagtgtaaccactgagatatgagtagaaaagagatcaaactgctgggcatacaaacttaggaatggtgaaaatattatatagatgttacagacaggttaaccatgaagcttctccataatttcatttttaaggaagatgtggttagagcaatttgaatctattcatagcattttttctttttatatttctataggtaagaattttgtgcttagatgaaatgtattggcactaaatataatgtgttgttatttaatagaattcacagtattctaaatatgtatttatgaaatccggtaagccctaacaaaatatagatctatttgtttttttaacatttgcttttaagtcaatattcaactttttcaactgattcatgcacaactacagtcttcatttttttcggtcaaacttctcaaaccaatagacaacacttttcayaacctcttaatactctaaattttagcataagtaagaaataaaggaaagaacataatctgaataacttcttgttagatacaaactatcagtatcagttgaaaatttttaaccagcactaaagtattcctaaaaatgaaatttttttaacaattgtgaagactaaagatcgatgatacacacgttgcaaaacattctatattaatgttggcaaggaaatggactaagaaaaggctatctcacgcagtttttgtagcaatgtataatggtataatgtttttccctatacttccattttaggccaatttttggtacagttttaagatactaaaatgtttatgcctcttgacttagttattctacttgtagaaatccatttgaaaaataaaatcggaaatatagacaaatttattcattacaaggggtgttcaaacaaggctttttatagcaaaaaaaaaaaaataatttacctaaatattcaacaacacagaattggttcaataaattatgatacaaccaactaaacgaaagagacaggcttacaataaaatattatcctaatcccacaataagaagttattttggggcagagactgcttttttttttttytctcttttatcccctaaaaagctcaggaaaacgcctggcctaaagaagcttctcagtaagtgttggctgaatgaaggaatgaataaatatcacctccaaggctgcagagttcagaaaytgagcttggcatacatactgttctttgaggtggtgtccctttgagactatttttattagttagcaatttgtatgtgtgcagaataatgtattttaaaaaactaaacataaattggtgctacagaaactgaaactattcattatctaggatggtttttaattttcaagataatttcagtgttgaattactttactttagatcagtaaatcattcatgcaacgaagcaatattgtggctgttagaaaagcccacagtaagttaatgactgctgtttatttttaattactattgcgaagaaagttttcagctttttaaagaaaagtgaaaaacaagttgaacacatcttaccatcatatactctgtaatataagtgttcttcaattaaaatcagtcaattagttcctgacatcactacagcttttattattagattgcctctaagaactaatattctacatgaaatgttaatgacaaagagaatatccttttacttaattgttggcaaggcatactctccaaatcagtccaaacgtttgttcaccttattaagctgggtattctggataaatgctcagaaagaaaacaattaccaattttgtctcttcaaataaccattcaagaattacaaaggaaaaccagyataaaatcatttctgcagtgacacggtgagttttaaatcaagcatattccagaaaccagaagagtgatatgaaaccaagattgagttttaatgtcatataagccaagatacttgtgatagaaagcaacagcatcataaaagaccagtgacagttacacgtttccttgcactgaccgtcttatctgaaaaatttaaatatagcctttatcctgttattttctagctgcttacagtgctttatttttcttttctgagcctgctaacacttgatatacatttatgggtttgtttgtttattttttatgtccctccactagaatgcagtctttggaactttgccttatttgttcataagagtatccccagagcccagaacagactacacagagtgctcagtaaacatttgttaaatgaatgaccaaatgaatgaatatctgaagaataaaaaatactgccataaaggcagaataatagagtgggaagtacataggttctggaaacagactaaaccagttttaattttgatacgattactcacaagtaatcttttgcaagttacttagagtttctacctctatttgcccatctttaaagtgggacaagacataccctaactcagcagtccccagccttttaggcagtagggactgatttaayggaagacaattttttcatggaccagggtggatgggggaaggttttggcatgattcaagcacattacatttattgtgcgctttatttctattattattacattgtaatatataatgaatcaattatacaactcactataatgtggaatcagtgggagtcctgagcttgttttcctgtaactagatggttccctctgggggtgatgggagatagtgacagatcatcaggtataagagtgtcataaggagcatgcaacctagatccctcacatgcgcatttcacaacagggttcatgctcctgtgacactttaatgacaccactgatttggcacgaggcggggctcaggcagtaatgagagcaatgggcagtggctgttaatacagatgaagcttcccttgctgctcacctcctgctgtgccgcccagttcctaacaggccacagaccagtaccagtccgtggcctgggggttagggactcctgccccaactgggctgaaacgaaggttagtagttggatgaaaatataatggaaagattgttatacaacatagtctctggagccagcctatcttggcttttgtatcttacttaacattttcaagcttacatgatctgcacaagttgatgaaactctgtgtcagtttcctcagttacacagctgggcaagtaacaatacctaactcaaaaagttattctatagataaaagtggcatatattaaacacttgataagtggattctcttgtagttgagactgtttttaatttaagtaaagcgctgagtatagttctgatgtatagtcagaacccaataaatggtagttattattgctattgtcttcctttgtccattattttctttcattttataagtcagaatgtgttcagcctctgctatctattagcatcagttttttaaaattacctgaactacgcttcagtaatttcctctccctacggttgcactgtgactatagactatttttaatggtacaatcaatcttttttttcttttgctcytacgtccttctgggacactctaaaacttacatgtaaaaacactatytgtgttctgcatattcaaatatgcagagagtagtaagtgaaagtayactctatttgtgtttttacctactagtmtcttgtatatttgaatattgctatgctaatacagagtggtttcctagataccagacagatttgaaagaactcttcgagctatagaagaaccctggtaaaattcacgctatatcctagtgcatattctgtttcttgggtttcaatctaactttttaaagaataatccaaagtagctttaaaaaatatgatgttaaaatattgggctggtcccttttaggactgccaaagaaatataatactcctaatagaatttctctagagaaagaattttaaatagctttgtgctcctkaattcacataaaagaaagacaagataatcttttaggtgatttaacagttaagtgaggtgtcagcctacaaggytgtatgtatctatgacttgyaaataattttggttttgacagtcaaaaatgagctctgtatggtactctaactacctgtctaaaagaaaaggcatttttagtactacctttaccaagacaagttacctaggtcttataaatggaataaagaatcattacctccagtttgatttgaccttgaaaacaatgtttttaagtctctgaatcttttgagtgtcatcgggtgaatacaaaagtattgtctaggtaattcttgtttccacaagaaaggaagaatttcttcttaaaagtatttcccaaatacatatacacacacacactcttaagtaggtcatttatattaataattcatgattgatttaaggtattcttatttctttatttttcaaattattctcttagcttttctcattttccaaaatagtggctgccctgaggatgtttactgctccctggatactagatccatggttttcattgtcttgaaggaccagaagtcaggggctctggacccagaaatatcagcagttagaactaggtctctttatcattgttaacagatagaaccagaaaaaaaaaaaaaaaatccaccatcaggaaagaaaactaaaaggaacacttgcctatgcagtgttggcctctgaaagagaaaaaaactctctcttgagaatccaccttccgctctcaagtgaaactaaggttcgaattcacactacttgggtagtctgacaaagttaagaatcaactttaattggccccaggcatctggcagagaataatccctcaaatgtggttttcaggttttctatagataaatcccagctgacaagaacccacaatccaaaattacaaatctcatttggaaatacccaccttagtgagtcaggacaaacaataagtagcaaaattagactcccacaaacttcaaatactggatttatgaatatacatgctatatttaaatattttaaaaagtataaagggaattaaatacatgagtaaggaagaatataatattttaaagatagacacttgaaaaagaaccaaatagaaattctaaaaattaaaatatataactaaataagtgggttaaaaagcaaattaccatgagttaaagaaagaagtaatgaactggagtagaattcaatacagagagctaaagaaatggaaaatattagagacattagaaagatatgggaagcattgtaagaaaatgtaacatctgtgtaatcaaagttccaaagaaagagaataaaaagaaacaaggaatagataatatttgaagagatagtggtagaggattttccagaattgatgaatgaataaatgtgctgggcctcagaaattgatatcccaaaatacrgcactttgatgtgctaaactgaagaagcctcgaggtctctctgacctccttccacctcctgtttctcaacccattgtctctcctaaataaagctcatgatgaagctgttccctgacgttcccttatctccctgaagtccagactggctcagaagaaaatggttacctctggtccgttccctgagttttcattaactgaactcatatcgcaggaaaaaagtctgaagtctcaacatacctgaacagactggtcacaaaccatcgtctgctttgtgggtccaacttgtctcaggccattgtatgttcaaccccattgaattcccataaaaaccatctattaccaccctaaaattatccacacttccccatctcccttccccctaaaaagaagggtataaaatggtctgtactccgctgcatggtgtacttgctctgtgacccaaccctccacggcactttgtatgccttcgctcctattaatctgccttttgtcagtcacttttcagtcaattttcagagggctaaagggaagttttcctttgaccactacaaatgcaggttctggaatcagtgcaaataacaagcaaaaatcaaactatcatacgttgtaatgaaattgtagaacactgaagtctcactactcccaacctcaaattctgaaaagcttccagagaaaaaacatggactaccttaaaaaaataataataaaattaaattgacaatagagttcccttattggggtataatttacatgaaatagaattyggcaatcttaactatacaactcaatgaatttaaaaatcaacagtcacataatcactatttacatcaagatatgaaacacttgagttacccaaaaacgtttcttcatgtctctctgtgagaaatctaccccaccctcatccttggcttcaggcaatcactgttatgctgctttctgtcactacagttttgccttttctagaattttacatacaggcatacgttcaatatattgtcggttcaattgcagaccacctcaatcaataaataaagcaatattgcaacaaagaaagtcacacaacttttttggtttcctagtgcttacaaaaattatgtttacattatactgtagtttattaagtgtgcaataacattatatctaaaaatacataccttaatttaaaaatattttattgctaaaaaatgctgacagacacacaaaaccaacatattcttttgggaaaatggtgccaattgacttcctggatgcaaggttgccacaaaccttacatttataaaaaatttaatatctacaaagtacaattaagggaagcacaataaaacaaggtatgactgtaaatgggaacacacaatacgtattcttttatttctggcttcttactttagtctaacgcttttgagatcagttcacattgttcaaaccaaagtagtttgttacttttttaaaaaaatagtatactactatatgaatgtaccagaatttgtcaaacaatagttcatgaacactttagatgtttctaatttttgactttttacacaaataatttcatattttatttaagattcagggggtacatgtgcaggttttttacatgggtatattacatgatgctgaggtttgagatgtgaatgaatccattatccagatagtgagcacagtaccccaaattcttgaatatgaacactaaagcagctatgaacatttcagtataagtatgacacattttcatttctcttctataaatgaaatggttggctcacatggtacgtgaatgtttaaactgtaaaactgtggccaaataccctatttttaaaaggaaaaaatgattttttttctttttcttttcccccacctcctactcggttcttaatgaaggcaaatgtagcctttaccttctctccaccaggcatgrcaaacttatctatgagtttacttagaagtcccagagaccctaccttgaagcaaaccaggtgcctccagaactctcttccaccaggaggtagccccaatttacaacctgactctacccaccttggtgccaaccagaccacctgacaggtaagacatccgaagaccccgtacctcctcaccccctcccctacatgtcattcatgccaaaccccctttaaaagcccctgccttcttgtcctgaagactgaagtggtaccctcaaggcaggagcctataatacctccyctcagctacctcaggagtaaagttactttctatcagatctcactattgttaattagatactgcaaggggtgagggatgggacctgygtttggttacagaactgttttccaaagcagtgggactaccaatgtttaagagtttcygttgttccacatctcaccagcacttgatattatcattctttccattttagccattttaggggcatataatggttttaatttgcattttcctaatgactaatgatttgagcatcttttcatgttatctgtcatttgcacatcttctttggtgaattatctattcaacttttaaaaattaaatttagtgatttgtcttattrctgagttgtaagaattctttatataatctggatataaattttgtattagatatgttttgtaaatattttctcctaatctctgtgcttttaaatttttaacagtttttttctacaaagaatatacatttttaattctgatgaagtctatttaaaacatttttcttttaaaatacatgtttttcataagaaattattgcttaacccaaaaatcacaaagatttttctcctgtgttttcttcgtctggttttatacttttaggctatttataataatttttatgcagtctgaggtatggttcaaatttcaattttttacatatggttatccaatttttccagtaccattttttgaaaaaactattctttctcccttgacttaccattggcaactttgttaaaattaatttaccctatgtattagtccattttcatgctgctgataaagacacacccaagactgggcaatttacaaaaggaagaagtttattggacttaaagttccacgtggctcgggaggcctcacaaacatggaggaaggtgaaaggcacatctcacatggtggcagacaagagaagagagcttttgcagggtaactcccactttttaaaaccatcagatctcatgagactcattcactgtcacgagaacagtgcaggaaagatctgcccccataattcaatcactttccactgggttcctcccatgacatgtgggaattgtgggagttgcaattcaagatgagatttgggtgggaacacagccaaaccatatcaccctatatggatgagtctttttctagactctattttgttccattgatgtttatagcaatatcatactgccatgataattgtggctttataggtcttgaaatcaggtgcaatgagtcccccaattttgttatactcctttccaaacccctttggctattctaagtcctctgcatttccaaacagattttagaatcccctgtccatgtctgtgcaaaggagcctgctgggagtttgattgggattgcactgaatctatagagcaatttaggtagaaatgacatcttaacaacattgagtgttctgattaatgaacatagcatatctttccaattttaaaggtctttgaagatgtttctgttctgttgtgggactgatagcataactgtcttgcacatattttcttaaattaatatctaagtatttactgttttaatgttattttaaaagatattttaaaattgtaactcccagtttttcattgtactacataggaaggcagttgatttttctctattggtcttctatcctgcagccttgctaaactctcttattctagttttattttgtagagttgtcagaattttatgcaaacacaatcatgttttgctgggactacaggtgtgtgccaccatgccccgctaattaaaaaaaatgttttagagatggtgtcttgctatgttgcccaggctactcttgaactcctagcctctaatcatcctcccacctcagcctcctgattagatgagatttgtgtgcaaaagtaattgaggtttttgacattttaaaaagtaatgacaaaaaccacaattacttttgcgccaacctagtaaaatagtaaaaatactattgtaattatagcataattacagacattatataagttgactcaatatagaaaagataactccacactgtaaagaaaatatatttaaatttagtttttgctaaaatgatgatagattgcataaaatgttaaaggtgtagataccataattagtttacctattgttaaattgggctttatcatggatacaaatagtgaatcatatcattattctatggatgacttctggcaagccaatttaaatacaatagtgaacttgttaagtataattttatttttcaaaaaaatcaatatttaatataattggtattattgcatttgtttaraaaatcttctctgaaaataatttactgggtgtttgcatcatcttcatttagtttgtaggtcttttgcatatgctagtatgatagttatatagggaaaaatacatttcagtgcattctgctttttttttttagagacaaggtctcgcttcgttgctcaggctagagtgcagtggcatgaccatagctcactgcagctgtagtctcaaattcctgggcatgcataattttcccacctcagcctcccaagttgcgaggactgcaggcatgtgccaccatgcctcaattttattttttatttttttgtattgacagggtcttactatgttaccaaggctggcatccaactcctggcctcaagtgatcctcttgccaattttaaataaagaatctggaagctacatgtataaagtaggattggggaaagccttttaaagtaagattaaaaagcaaaaggtatgctgtaaaataacatacgaaaatacctcagtattttgaaattaaaaatttttgaaaggcaaaatgtgccacaaatacagaagtcaacagattaacagtatctatggggggtaaatgttgtacagatgttgcatatataatgaaatgatttttaaaaaagacaaacaatccaattgaaaatggataaaagatacaaataggcaagtgacagatgagacaggaaaaactgcttaaattcactagtagtcaggaaaatacaaattagagtaaacatgactctatagccaacagctgaaacatattgctggcataggtataggaaacatgtacactcacgttgctggtagaaataggaagagttataatctttttggaagcaatctggcagcatccataacattttaaaaattcatttgccttaagatctagcaattctgctcctgggatagtgccataacataactatgtaaggacacaggtacaataatgtttttcataacactgttcagagtggcaaaaaatctggatgcaaagataatacttaaaacaggatggtttaataaatgatggtatgtccataccatggaatgctatataacccataaaaagaacaaattagagccatcaattaacttcagagattttttcaaaaattatcgaatagaaaagcagaaaagcacatgatatgatttatcctttgtaaaaaggaaaggtttaaaagccactatatgcaaatgtgaatgtgaatatgggaatcattaccctagtataaagaaaattatattgaagatacacaaggggttgttgacatgggtgaaggatgaaagaactcaataagaataaaagaaagtaaaaaagggaagagcatagacaaaaaaaaagggagaaacaatcatacaacacttccaaagaaagcattatgatgttaccatatttatgcttttgtgtaaattatatgtggattcatataaaaagtaattacaatagacataaaatattttatatatacatatataaatacaatatataaagatttaaagaccaataattgtgtcatagcagtgaaattagcagaaattaaaaaagaagaaaacaaacactaacttataaaagctaggagtattaattaagggcaatatgtccaggaatcctcccatttgttttttccctctgagactgaatgcatcagtaaataaatgttagagggcaagaacagaggatgaatcaagttcatggaaatatccttcattttgccgttgctaagggccctcaactggctgctcactacgctaagctaaggatttctcaaatgctggttctaacaggatgcctgttaaaataatcacttttgtttaagtaatatactaaaatgtcttcatacttagaagtctaaaaagtttgctatttattgcatagattggggaggcaaaagaaaacacaaaaacaaaaacacaaacacaaaagccagaacaaataaaacacattatctacttccctggagattgctccccatctgtgagtaaaattacaagtgaaagatttaagagttggggcacatactgatgggctgagtctacactggctcttcctgtcatataattcataaagaatcagaaggtactctccagctagaaaatcagctctttttcctgagtttgtttttttttttttttwaataaagaacttagcaaccaatctacacagtcattacaataaagtttgttatcctcttctaggtgggaagctcaggaaacctgcctttgtgctcctatttcagagttaataatatttttaactttttaggccttcggggccacaaagacaactctttaatcaagacatatgaactgactgatgtgctttcttttcttttgatctttatagagcttgtaattttattttttaataatttctctgttaactcaactcattatttattgcctgcaatgattatgaaactatttgatcttcaaagtacagaaygatacagtatcttttgaatgacctttgcatttggctttttaacccttctttttatgttttaattatctactaataacatttctatatacaaatgcattacaagaacccactagaatgtggttaaatttgaattggaatccttcgttttacgtgaccaatggtgcaaaataatagagctaccttatcaaagtcagcaaagattagtttgctattatcatgtatttttctaactgaatattcctttatataaattattccaacagtttcacaagaacaatagtactacagaaagagaatacaatgacttcttaaaagaattgccatactacattccatatttggcagctatagattattcttcattaaatataaataagaataaaataagttttatagaatatcaaataaggaattcttgctaattcaagcccaaattgcttcagcctacatgaacctatattacaaacccatattacaatacccagactaccagcattcatatgaatgtagggcagtgaattgtttagagtcagatctatttttctttctcaatataggacatttttgttttactagtacatggcgggtggcagggtgctaacctatgaattctctgggctacaaagcatgaaaggagttatggatcagagcacctgtatgtttgctattaaacataaagctcacataaaatgttctaggctattttgtgccttgtagaactttgaatatttttgtttatctttgtatgtttttgaatgtttgctatcaatcacctaagccacaataattggagaacaaagttctcaacttccaagaaatatgctcaattataagcctgactttttctttatgaaagagaaaaatcagggaatgytccattcagataggaagagcaggaaatcatttttgataatgttttcaaactttaaatgtaaccccaaataataataaacagcataaaattgacttctatctccactgggttcatatggtatatgtctgacccataagaaattggattcaagaggataaagtgaatcgttgaaagatgcaatttctcatattgttgtgaagatctcaactgaagagtcaatcctccgtaaatacatccccttgacaccctgccatgtaggccagctgttgtcctctaaatgtaaattgttaaatgatctaaatcacttcatgaaactttaaagccagacagaaaaccatagcaaaaaaggcaaaaaaaatccaggattcaatttacttatatctgaagaacaacaatctcgctcctttcctccttagcgtccatgctggtccaagccaccaacttctccttcctggactcttgcagtcacctcctcactagttttcatgtctctcttctcctccatctttagtcattctccacacaacagatccaaccatgtcatccttctgccctactgaacattttccagtggattcccatcacagttaaaataaaatacgaactgcttactttggcttacaagccctgtatctgagattcccaaccttaacattatggacattttgagccaaacaatagttaggaggtgcttctgtccattttacgatgttgagtagtatcgctggcttccagaaactagagctggtagcatccattttgctattgtgacaactaaaaatgtctccaaacgttgccaaatgtccagagggtgggtcggggtggtgggaggcggtatgtgtggattgttccttctgggaattactgtcttataccatctggccatggctacacttttggcctcatcgcctcttgctcactccactgaaaccacactggccttttcaatgttcctccagacataccaagggcccttctaaatgtggctgttgcttcacttgctgttctctgcttggaatgctctttcttcagacttattttctaacctaatttatgttctatattcctatttaaatatcttctctctatttaaaatagctcctcctgtcacactctactcttcagcatacttttcttcatagtatttcactactcctgggtttataatctatccactgtttacctgatattttgtctgtcttcctcacttaactgcaaattccacgaaggtagagattttagcactgtcttcctgattcctaaaactgtgcctgtatgtattttcaatacatattcaataaatatatactgactaaatggatattcattgaatgagtatggattctggtagtagtcctctagaataccataaacaattaagggttgctatttccctcatttcggtaacagtttcatatactatcttaaattgaaaaggatttcagatatcttcaggtracacagtcattttatagataaaaaatttgaggcttggagaggttagtttgtcaacagtgctacacttactttgtgaaaattaagtctaaaaaccaaaccgatgactaacacatttcaggacttctttttatattctcccttgtggacattttacccatactgatggaagcttcatttacaattacatttttagaaaaagtggaattcaatctggatacagatattgcatataagtaatattatttaagaaggctatttgttgctatcctgattaagtgaagactattttgtcttgcatatttagtaggaaaktcaatcagtaacataacagattatttttttaaaaatgatggcttagattctgattacaaactaaaatatctcaaagaaattttagatatatctgaagtagatataaagtacagatatttggcagaattagatacatggcagaagtactatctgaatggattcattttacagactttatagactgatttgcatcaaagctataagactatatgaaagataaacattattgaaagacacagtatttggatttgccacaagttatggtaattttaacatgattagtaaggtagaattctatcaagtcaactcagtctacatttataaaaaaagatatctaaaatgtacatgattttggagggttaagggggattaaaattttaagtatgacaaagcttctgacctcaaaaaccttatgtttaagagataagtatagaaaaaacaccaaaaaaatgtgataaatggtagattcaaaatataataatgatattaacagcctactattaattatagaaaaaataataagtgacagtaaattaggttttgtgaaacaaacaaaaaacagtaattaaacccagatacctaaaagcctgtacacttaactaatggtccatactcctttaaaaaaaaaagattaattctgattgggctgatcctgatctggaaaattagaaaaataaaatataaatatgtcatgaatgataaaatatatatatatatatatatatatatatatatatatatatatatatatatatagtatcaagggttcatgttggaaaaaccctgagttctttggtttgtctgaaatgtggtttaatggaaaccaccaaatgtaggttgtaggttggggatggaccgtagagagactttaatatcaatctaaagagtacagactctattttgtaggcaatggggaacatctgaagggtgttaataaaaaaagtgacaagattatacttaattatccttctgaaactagcagcctgagggccaaatggactcagctgaacagccagcgactgatgaaagccattcttcaataaattcaatacaattaggttcccccagagtggcacccttgcttgccacacacaccaggctaacactgattayggggcaatatttgagtatacgtggtatgtggctgtgtatttcttttgggtaaattttattgtggtaaaagcacttaccatgagatatactctctcaacagatttttaagtgtaggatacattattgttgagtataggtacaatgttatatgtcagatttctgaatttctagatcttattcatcttgcttatctgaaactttatgcctgcagattagtaactcttcattttcccctctgtaaactcctggcaaccaccattctaccctttgattccattgatttgactattttagatacctcatgtaagtgaaatcatgtaatattggttcgtctttgtgtgactagcttatttcacttagcataatgtcctcaagttcatccacgttgttgcatattgcaggatttccttctttttaagaatagtattccattgtatgtctacacaacattttctttatccattcacctgctgattgacatctgggttgtttctatatgctgtctgatgtgaaaagtgctaaaatgagcataggagtgcatatatttctttaagatgctgatgctggatcatatagtagctctgttttcactttttttttttgtaggaacctccatactgttttctatagtggctgtactattttcgattcccaccgacagtgttcaagggttccaatttctccacgccttcaccaatattcattgcctttgtttttataatagtcatcctcacaagtgtgaggtggtatctygttgtggttttgatttgcatttctctgatttgtgacattaagcatttttttttcatgtaagcggtttgccatgtgtatgtctactttggagaaacatctactcaagtccttagcccattttctgatcaaattttttggtttgttttactatagagttgtaggagttccttacatattttagagactaaccccgcatttgtggtttgcatatagattaagcccagatatatagtttgtaaatattttcccccattccacaggttgtcttttcattctgttgattgtttcctttgctctgtagaagatttttagttgacatagtgccactcgtttatttttgttttcattgactttacttttagtgtcatatccatgaaatcactgccaagaccaatgtcatgaagtttttcccctatgttttcttctaggaactttactgttttgggttttacattgaattctttaatccactctgagttgacttttgtgtatggtacaagataagggcccattcattattttgcatgtggatatccagttttcccaacaccatttgttgaagagaatacctttccccattgtgtattcttggcatccttttcaaagatcagttatatgcatggatttattcccagggtttgtgttctgatttgttctattcctagctatacgcttgtttttattccactaccttaaacaaaacagattactatagcttgcttcttactgagacctaattacattcaactcatccccttgttttatgggcttgccatagaaggatcactaggaaagcaaagcatgtaagtacttcagctttacagctctagtgcatcttaggctaaattgcgatttgtcagtgaaggtgagtccaagagaggcctgttttacttcttaagcaccggaaccacataattaatataatctctatatcttctgattggatatctatctcatttgaacaaaagcaatcctgtttcacccttatcaaaaatcatcccacttagataataaatgcttacaattatattcttttcatggttacaaaataccactttgatcagataaaatatgcttactatggaaacctctacaatcacctaaactctacttaccacctgctgtttcacttagttatgtgttcacatttagggacctgccttgcagtagtgtatctattactgatgggacttctctcctacaaatgatcaacctgaccataatatgtaaaaaataacaagtttttgggtcaaatcatttccaagtcaaaattttgcaagattcccttgtcatatgacttccatcctcagcactacaatattatcattaatgtttaaatcattgtcaagtctgtgattgccttagagatttattaagaataacatgctaggattaggaaagtttaactttttaccatccttaaaattagatttttgaaaactgtcttatccccattaaagaaaaaaataaaaaggatgaatacactcattctttcccttcaattttttgttacattttttttttcctgagtagttgtttcaaatatatataagaggatctagctggtcttgggaggtctgcaaaaattttagagcaggtaatatccaaaactaaaggataaatagaacttatcaggtaaagaagtttaggaaaaggcattttgggcagaaggaaagcatgttcaatggcaaaagatgagagatcataaagtacatcgtaggttaatattagaagaaccctgaattctgtactttggctggactgtaagtgtgatgtcacatatggtaccatacctcaacaattagaaatcctctcattcaaaacaatacaaactgatagttgtcagcttgatttttttaaagttggcaaaggcatggaatttatcatactctcacttcttaatcataacactgaattataaaacatgaaatacacaatttatttaccaatcttttgaaataagaagtcattctctttgtgtatgaatccataagttgaagttctgaaaaatctttctgtcatacaccacacccatactgcactatttaccactgccagtttcagtttctttacgttggaatgaaaaagatatttgtgaccaaatctgagtacagaacgattctagatttttacaaatttttccccagcctttcacagttatctcaccacatttgacagccatttaaaaaaagaaaactcattaaaagttagtctttcaaaacatttggctgtttttttcttactcatgtttcatatatttaattacactagattgctacaataataggtacaactagcatgtttgggaataatcaccactgattttttaatgcaaacattttagctggtggaaacaaaagtacatagtatgactacagagtaaccttttagttgtgaacattctaggtcacagacctcagacaaatgttgtacagaggaataaacagagtgcttgaattagtcaagctggtctaggtgaagaatccatttaagacagcatttgtttagttccgtgygacagaataaaatgcaagataggcaaatgtaaccctagtgaatacgaggttggaaaagagaaccaaatgtgcactgtgtgccaggctacaaaattagggagcttacttggaaaatcagtatgaacagcgcttcggaacacagactctggatggaggtaaattgcctaggtttgaatgccacctctctgcttagccatatgatggtgggcaagttatttaaccactacttaatgatttaattaatttataatagtgaaaaaaaaaccataccaaaataaccagacttatctggttatttttagggatacatgagttaatattgyaaagtgcttaggacagtgcttggtcaaaataaacactcaattaatgtcagctttatgattatactaatatgatgactgatagtgaagccagatatcgccctgacccctttgcgagccttgcaacaggggtgccttgcttactcagcccacagctctcaaccacttgcaggacagggagcacaggtgagcaggtayaggagctggggtgagtacttttgggtgccagcaggagcaaaactccatgagggccctgcagcagcattaggcaagggcagtgggggggatgggggttgggggtgcccacgacccctgaagccccagaaggagtgttacgtatagtaacacttyagttttgccatttgtggatggcttaagtgttaacagctcagtggagggtcagtgtgacagccttttgcgcccacacttacggcacccaagtttttgcccaacatccaggaagaatgaggtcagacgaataaactgaatttggtaaatttaggagctctcagtgtaaaggggagctgaaaggaggatacaacaggaaggtaatcttttcctgaagtccagctgtccccgaccagactcctctctgaagctatgccatcaagctgtccctctgaagtcaagttgcttctcttcaatggtcaaactgtagtctccaacatccaactgcttctcctcctctctactggctgagtccagggtttttatgggcacatgatgggggatggggcgggccatgggtggttttggaaaaggcaacattcaagtgggaaaacagggatgtaagttctcactttgggctgtggtatcaggctttggggccctcactagggacccaccctcttctgcccagaatttacctgcctcctgtccctatcaatagtttctagatttactgttccaaggcataatcatgagttcatatataaaaaatacttggaccagtacttgctatatagtaaaaattttatattcatttkttgctgttatcataagcaatttaaatgttttaaatgaaggagtactcagatttgcatttcagaagcaaccatgccaacagtgagtggggcaattggtgggggggaaatgcttcagaagttattggtgctgagctaggatattcccagggtgaacaggtagaagtaaagtaggagccaagccttactcatgcgacacaacggtcagtacttgctgcttggctggatatgtctcatgagcaagagggaggagttaaagacattcatcatggatacatttttctctgcagttgcactcaaatattatgtagtttttggtttatgggtaaactcagaaaagaagtaagaaattcagagcaggtatttctaagaaattcacaaaatcagctacaaagggaggaaaagccttatctttataaacagtatctctgcatccagcaacctcagtgtccagaaaaaaactgaccccttttttattaagccatcaaacttctctctctccttcaaattatttatagtttaatatcactaaaccacgcaggtacactttgaagatctaggtatgagaagcctgtggaataactctttgaacatctttcctttaacatgaacttgccggataactgatttagcattcactctactgagaaaactctgtataacaaagttgcctagtaaaatcattaggctccctgtattgaaatgaaaaaggctttggggatgtttcagacttttctgtgtatactcttgcttggaagtgggtatataatgatactaaaartgtatttaaagttcccaaaccatgcagcgtgagaaagttaccatatctttaaagaactgtctctactgtacaaaagacaaaagacaaacatcaatttttgactaaacagataactatatttatgctttcaactatttatgcttagaagccctttcagatgtgtttggtttcttttgtgttttagaaggtttagataacagggataacaatgtaacagaataaatctgtatctatgaagtaaataactggattcacaaatgaaatttaaattcccagttcactgaatttaatagttatttattgagtgccttgtaggtgccatgcactgggatgcaaaaatgtgcaaaaaccaatacactctcaaggaactttaaatttagtaggaaagatagacattaatcaagtaatcatttaaaaatgtaatatcatacccgtggtaaagaccatgagagaaaggtacaggaagccaaaaatacttacaataggggaatatgacctagtctgagatagtggagagagctacacaggcaaggaaagcaaagtttcaggcagattgagagcgtatgccaagatcccgtgttcagaagaaacctagtgcatctgagaaactgaaaggccagagtggcagaaaggcaaaggcagtaggaacacagtatgaaatgaggcaggagtggtgagctgggaccaaactgtgctgtactttgctggaagaacaaaggatcttagtccagtggtattatttaatcaattggttaggtgcctaaataaatagtttagtcaagatagttcaaacaattgcttattctgcgacaagagasatgagttcattttacacagaaattcagtgactgatggccctaaaataaataccttataagccagacaatgtagcatggcagggtgtaatgaagttacatgactttcacctaaaggtacttgagaaaacttctaatgcagtgaaagcacgagaacggtgctgtgagattattctatttctcctgcccaggaaacatcaggctaggctatattaaggtcaaattttgaagaaggaaacattcatgtctgcagtctttttttgtgaacttacttccctctctcagaggctactctctggggttaacaaaaactctctccactttcaggccctcttgagttgagcacctccctatccaacaacaaccgtctccctccattcatctagccgtttcatccatctctatcctctacctacagtgggctcataaactctacctacctttcccaccattcattaaagtatatctgtactctccaagagaagggaagggattcttacttctgtgagttagaaaagcatcagtgttaaacagaggagagagagagagagagaaagagagagagagatagacagagagagagagagagagagagagagagaccattaaaacagtaaatgtgccaaggaaggagatagaatactactatggactaaagttgactaatggaacttttaagtacagaaacttcagttaagcctaaggttaggcttagggagggaggctagacatgataggccatttcagagtaagcaaaccaggcatgaaaacacagtatacaggaaygatgcatgctaggcttgggatgaagcgtgaaatactaagggaaattttaaagcagcataaatgcaacagagagcattcacagttagagcagtgataaaagtaaaattaagagagcaagatcttaaagagccctaaaaactaaggtgagaagtttcatttttcctctcttgatagctgagatgaactagaaatctgcattcagcaaagtaacctgatgagagctgcattttaatcaaattaataaaatgaatcttgtagtgtttatgtactcattcaatgaatattgattcaattcctaccatgtggtcaaatgcagtgccagatgctaggattgtagacwaaaccaggawgggaaattttcattaatagaagcgttgaattttgatgtaggatggcaacagtgtgaaaagaaaggaagaatcagagagactttgactttgttatcatattattacatgttagtcactgagtcaaaagaagggcatcaaagctgactccacagtttgaagtctgcaggatgaaaaattgggttgtatttggggggaaggtgatgacacttatctatgaaatattgagtttgaagttgtaagtgatttcgtcaagtggaaaggtaccatggacagatgaagttcatatgtgagacctgataattctctcttcttactcattatttttagttgacaactcataattctaaaaccctggtatttgcgacacataatattatgcccagccatcggggaagatattgttgatctaggagaagcctgtatataaatattctccctgtatgttaatgttattgtgattgaacagagaatgtagcaaatgggaaggctgcaggatgtgggaaaaaccaagatatttagaaaagaacattataatttactcttcaatatatgtgaagcatatttacaaatatatataatcacatatatgtatgtatataaatgtgtatttttgaatgcttttctactttttaaacaaatgataaagatgaacaaccagacattaaaattagaatacgtacacagttaaaaaaaggaaattacacgactgaaaatggtgtgcactctcatagccatttacctaagctatcttgtatagtaagaagtttacatctgaaagacaaaagttacaaaaatgcatgcattcaaattcagctttaaaagtgaaattaaaaatrtattacaaaatgtaaatcaaaaggcattaatttatgctaaaattgcctttccctccaagggtttctaaatactcagcaaactttattttagcagtcatgctctaatttcaattatgtggaaattattctatcttcatgaacatgaaaacagaagaataaataataaatggcttgtctttgtttaaatagtacattgaaacagtacaaataaaaagattcatacccacacatgtaaatgctaagaactcctaataatccaagttggctaaaaagaggctgaaacaggagttttgaaaaattatctgggggtcaggtatcaaactcatggcattgaacagaattgcaaatgtttttcctttcccattttgacagcaatatacctattctctgcttctggcaacacaaacaacatattttctctagctttacccatatttatcaaggaagaaagagacaactattactgctatctactttaacctgtctaatctttcaattcctattcaagatttcctggaaaattcatgtatgtatttcaagcatttgacgggacagtaaatatgtatcaaaataatttcctctacggaaattgcagtaaatgcattsagaattttctccttttaaaaggtagaaggagttcctagaggaagaaacttcctatagtacatgcaatgtttaaaaaaatattgatcaggcaactacatttcaaaggtgtctgtcttgccttaagtgagaggcttctttccagtatccagttataatgtcaaaggagaaacaaataaacaaacaaacctaagacaaaaaaaacaaaaacaaaaacctctcaaacacattgtaaatgaaagaaggcgagttatctatctccccattgccctttttttagtaggcaatttggctgtacctatcagaatcttacagccagtaaatttagaattctattcagcaaaaataattgcaaaacacataagagcatgtgtatgagaatgatccttagagcatacagccaaaaatgtaaacacaatgtaagtgttcaggtaagtaacttaaaaattataatacattcaagctgtgggatgctgggcagagataataaataattagttaaattgtggtgataatgtttgtgatggatctcagactggaaataacacattaaagaaaatccaagctctagattaaaaaacacaaacacacacacaaacaagcatacaggtacatgtatgtttctgtgagcattaaaaattatagaaggagacacatttaaagttttttttttttacttcatgggggtaggataatggggcaattttacaaagaraagccctgatctttataaaattcagtatttgggtttttatttacaatgcccatgtraaaacaagaaagcaaacacaaagtttgwctaaatgccagtggcttygtgaaaagtagttgctacttgctcctaagttgataatcaaggtctacatctagcctgaaagtaaagtagcaacctctcttactgctcaggaactgatgcctgagataccctcacaacccacactatgagaacttgtgattttgcatctcctcagcaactacaacttccagtatgcagaatggcagaaaggacacacatggctagagagggaatggatagtggcaaacgacattgtggaaggtggagatcatctcatgataaagacagatgagtgaagagtagtcaagaagaaccctgggaacaataaactttggaggttgtagtttccatgctttgttgtcaaataaaatataaagtctgacttaggattactaggatatgtttagtctttcttataattagttaagaggaaaataggagcagttttcccccttctacccaggaaggtaccagtagactaataaccactgggtactggacaataggtaagaggctatgtacatgcccagctaaaaatatgacaatgagatttgatgcgcatcaagggaccaaaagcaaactaatactttgttggttagcaaatgccaaggagctaaatgtgaactttctcaagaattcacaaaataattgacatccatgaagacattctgctatataagagcagaaaggggttaccatctaaaacatagaaggaactcatacaactcaatagcaaaaaaagaaaaaagaaaaaaagaaaaaatctgattaataaatgaacaaaggacctgcatagacatttttccaaagaagatacacagacgagcaacaggtatatgaggaaacttcaaaaagttcatggaaaatatgaattaaaagataaaaatttaaaaatgtgcaaacttatttctcaacataagctccatcaaggttaaggcaacttgctaagtaatgataccagccattacttggtctctgaagatctgagggtcctgggaatttaaccatgtccatgcagcttcttttacactgttaactgaagaaaaatgggtgtcctttaaaattgtttaacgttaggaaacaaaaagaagtcagagggtgcaaaatgaggactgtaaattagatgcttaatgacttcccattgaaactcacaattgcccttgtttgaggaaagagcagaagcactgttgggttggaggagggatctcaggtaaagttttctcaggtgtttttttgctaataatttggcaaactttctcaacacaatttcataataaacagatattatcattgttttggccctccagaaagtcaaccagcaaaatgtcttgagcactcaaaaaaactgttgccatgatctttgctcttgaccagcctgcttttgctcttcctggaccacgtccgcatcttggtagccattgctttgactgtgctttgtcttcagtcacactggtaaagtgatgtttcatcttctgttataattctttgaagaaatgcttcaggatcctgatctcactcgtttaaaatttccattgaaagctctgctgttgtctgcagttgatctgggagcaacggttttggcatccatcaaatggaaagtttgctcaactttaattttcagtcagaattgagtgagctcaaccaattgcatgtgacatctatgaagctgactaccatttctactattaatcatcagtcctcttcaattagggcatgaacaaaattaatttttcttcaaaaagtgatgtggatggtctgctgctgtgggtttcactttcaacattgtcttgtcctgtcttaaaatgagttacccatttgtaaattgctgatttctttgggacatcgtccccataaacttttcaaaaagcaccaatgatttcatcattcttcyacccaagctttaccataaatgtgatgtttgttcctgcttcaattttagcaaaattcatgttgctcttttcaaagtgatgtcttattcttctcaatgcctcaaactaagttctttcagacacattacagcaagtttagtatgagtttaatttggtacaatagtttttgaaatatgtgcatttttttataatacatatattccatgaactttttgaagacctcctatatgaaaacacaatcaaaatcactaatcatcaagaaaatacaaatgaaaaccacaacatagcacctcatacctattaggacgacttatcaaagacaaaagataacaagtgttggtgatggtgaggagaaaagggaacccttgtacacttggtgggaatgtaaattagtactggtattatggagaacagaatggcggtttctgaaaaaaattaacaacagaactatcaaacaatccagcaatcctattcctgggtatatatccaaaggaaatgaaaacagtatcttaagaggtatctgctcccccgtgttcgctgcagcattattcataatagccaaggtactgaaacaacttaagtgtccatctatagattatcagataaacaaaatgtgatgcactcatgtgcacgcgcgtgcgtgcacgcacacacacacaaatattattcagccataaaaaaggaggaaatcctatttgtgagaacatgaatgaacctgaaggacattatgctacatgaaataagcctgacacagaaagacaaatactgtgtaatatcacttatgtgtggaatctaaaatagtcaaattcatagaagaagagagtagaatggtggtttccagggctgggagggtgggggaaatggggagatgttggtcaaagggtacaaagttgcagttataagataaatacgttctgaagatcttatgcacagcatggcaactacagttaataatacttgtattgcttacttgaaacttatccagataatagattttaagtgtactcactgaggaccatctccccacatacagtagctatagatagtgacatatgtgttaattaatttgactgtggcaatcaatatacaacatgtatgtatatcaaatcatcacactgtacactttgaatgtacataacttttactccaattgttttaaaattaaaaaataaaacattatactgcaaaaaagagaaagagagaaaagaaaactgttgataggctttagaaaagctataaggatgaaaaagttaacaacacattgtagactatttgtgaaaatcatgccatctcctgagacatcctatcagataatctgactagtaaattaaagactaataaggcatttcttagccagtgtaaggttaagtgtttaacacagccaatacttttctaactctgcaaactgaaaacatgtttattaaaaggctcacgtcacattgaatggccacatctacatccttgatatggttatgtagagtttttgggctaatcaattacaaaaaataaaaagaattaaaagaattaaaaatcattgcttcgttgtatgatttagtcatgcgaaagtaacaggacactgcagtcactgtgatgatattggtagttgaaatgcagcttttgacaacataaagtgtttctgtctgaatgcttgtaacgcaatcatgaattttctctcttggaaatggtgattctttgaagcagagtcatatggatttcaaagaaaaaatttaacattttgtctactttttctgttccaaaagatatagagaaaatgcatctggtgtttctatgtcttccaactcttttgtgctactacagaatagataagccattctactattatataaaagtggtgggacatcgctgggatagaaaatttacaacagagagtaaaagtgaatccttgaagatgtgaaaagccaattcaagttctgttataaaatgggaccaaaaccattaatatattccttatttttttacctttcctacactacttccttcctccatccccacacagatgcaaatatagaaccaaagtctggcaggaatgccaaataattgtaagagcaaaaataatgtatgttttctttgcttgtggcagttttattatcatcaacttgctaattttatatttcatagtttactggtaaacttttactatgtgtaaggctgatctaaaacaaaatgtcaatcaatgcttctatatttgaaatattatagttggtgatacattaatggttctcaaaacatattttctcattaatagatcagtcatcacaaaatgaatcacaaaaaagatgtttgcagttggtatagtggtccccccaaaagataaatccacattctaatccccagaacctatgaaggtgatgttctttggaaaaagggcctctataggtgtaacttaattaaggatttcaagatgagataatcctggattatctgggtgcatcctacattcaatgattagtatccatgtgacaaaaaacacacgtgggagaaacaagtagggaagagaagtcacataaagatggaggcagagaatgagtgatacatcctcaagctcaagaatgctgatggtcacaagaagctggaggaggcaaggaagggaatctctggagggagcacagccctttcaataccagacttgtggcctctagaactgtgagagaataaataactggtgttttaagccaacaagtttgtggtaatttgttacgacagcctcagaaaaccaatactacatttttttcttttcatgcctttcctgtcattcaaaggttaaaaatrataacaataatcacacccactgaacactatctgcatgtcaaaatagtgatacgtttcttacagtyttcttattcaacctttttaaggactctgtgaagatgacattattattaactcatatttgttgatgaagaaacagaactaggattcaatgccaagtagatctgactccagtccatgctcctccagcaaaaataggaaagaatgaagaatataaagtaaataaatccttctttgcttgcatgtacattctaaaagtccctggaacgaaggcaaagaatagggagacgggaaacaaggtggacgggtctcttctgctgcactacatttttaaaaatctctgaaccatgttaatgtattatctactcaaaaataaattacaaaagaaaaacatcagttgcctggcaaaaagaagctgataaattcccaattggataataagaaattaatgaaaatattataaatttatgggcagaatgaacaattttgagaatactgctaaaattatatcatacatagaaaaatatgtcaagaaattattaggtactactagagtgctgctcaaataaaagtcagtcccttcttataatatttcctaagtctcccaccttctacttcactttcaatcatccactttaccaccaacaacaggccaggagtaaatgaaattaatgaaatatcccaatgttcaatgtacaagtctctccctcaggaatttctttcctttcctatttgctgtagttattcaaaatttgatattatagcctaagatagtgtaaaccattagatgtctcaaaacacagattatgaaattattaccaagggagctataaattcttatttgttgatgatatttaagaaaatgaggaactttttttgttttaagtaatttgcatttagacttagttaggagaaggaagtaattatgacctctgatgacattcctgaacttacagctctaaaactttagcgtctttcaccataatccccttatttaagatgtgtgagctataaaaataccaaaataaataggaatttcttttctttttttctttttttttttttttttgttgaaatggagtttcactcttgttgcccagggtggagtgcaatggcgcgatctcggctcactgcaacctctgcctccagggttcaagtgattctcctgcctcagcctcccgagaagctgggattacaggcgtgtaccaccacagttggctaatttttgtatttttagtagagacagggtttcaccatgttggccaggctggtcttgaactcctgacctcrtgatctgcccacctcgccctctcaaagtgctgagattaaaggcgtgagccactgcacctggccccagaaataggatttcattgttatattactcttccttacatcgctcttcttgtcattaaaaataatttctctaataattttaaaaagattaagaaaataagtctttatcaaaatagtgactcagtttttcatttttatcaattagcattttatcaaatcttcacaactactctacatgccaatagaaattgatggttcatctttgccagagacatacacaaaccccaaaagataattgagtagattagagtgaacaccaataaaatctaggtcaaacttaataaccttcaaacagcagcagccacagtgcatactaaatgtaccaaccatgaactagacattttgatgaagtcaaaaccaattcagggccgcctgaggatgatccatttccatatactgacttttgcatgactttcccttttcagtatatttactttcaaatgtaacttttatttcactactttaagtaaagtgttcaaaatgacaagctgaatcctggtaattaatttctgattgacttttcctaatatgactcaccaaattaagccataagagacagaaactggcagaggtagaaacttgtggttaaggtataacaaactaactgaaacctgcaaataaccaggatttcaatattagaaatcacaaatgaaacttagaaagagcagaatcagcaaattatactgagtctatgccaaccaagacctttctcatagagactctacttgttttcaggatcatttacatttaattctatggagcaatgmgggtatgctttcaagcaccctaaagttgacaagtgcttctgcaaaatattttcttccttgtttgttccttgtttgcataccggagaggagattgaaccagaaattctcttttaaaaagggttttgaaatgtgcgcattttcttcaatcaaattcacttatttcttgaaaaaaaaawattctaagagtaccattgtgagctaaggcattagggaagataaacataaactgtgatgattgcattaaccaagtgtcaacttgattggattgaaggatgcaaaatagtgttcctgggtgtgtctgtgagggtgttgccgaaggagattaacaattgagtcggtggactgggagaggcagacccatcctcaaactggctgggtactacgtaaattgctgccagcttggctagaataaagcaagcagaagttgtgaagacttggcttgctgagtcttctggccttcatcttctgtgctggatgcttcctgccttcaaacatcagactccaagttcttcagctcttggactcttggacttacatcagtgatttgccaggggctcttgggcctttggctatagactgaaggctgcactgttggcttccctacttttgaggttttcggactcagactggcttccttgctcctcagcttgcagacagcctatcgtggcctgttgtgtccatcacaccttgtgatcacgtgagtcaatactccttaataaactccccatttatatatacatgtatcctattagttctgtccctctagggaaccctaatacagtaggtttctcctttccagaggtatgcaccctaggtagggacacagaaagatgtggtaagtgacagtgaaatgtgatgtaccaggtgcctatggagaacagggttactgatttattctggggaattagggaacatttcacagatgtctttgagatagaaggccactgaagagctaatgctttaaagtttttgaaagtgatttggctttttgcttttttcagaaggagcttcccttagtatgctctatatttttgacattattgtgaggcttctgttaatttgaaagtcctaatgctgagaattgatcttatgtgtttctacatttttgaaatagtattttatatttatgtgctttaccaagcttctatgtatcattatctttgtacattttaagaaagcaatgatcactatggggtatgtcccaataataattatggttttattcatactacttctttgccccagtaactggcaggaattttttaaaacattttgagataattttagatttacagaggagttacaaaaatagttgagttcgcatacacctttcacccagctttccctaatgttaacatcttatataaccatagcacaattgtcaaaactaagaaattaacattggcttaacactacagactttatttagatttcatcagtttttcctgtgaagtcctttttcttttctgagatcatgacctttttaaaaaaataatttactgaatgactagttatttaagagagaaaaaagaataagaattagaactgccagcttcttaaatgagagattcatgttgaataatatttatttttgtttatgttttgaagcatttaagtgagataagctttgttcaatgttgttttatatgctactcattgtataacattggctgaactctgacaaatagtagctacacaaaaatacattttttcacgattcaattctccacacttcactgttttaaaactgaaggtggttccttaccttggggatggaagggtcagttccatctgaggaggtttctcaagacagtggcatctataaattcccttctctagtgggagagtggtagctgcaggcacttatatggagatgttcatctgctagaaacaaaagctcttccaccatctaacatcaaagcaagaggtgatttgtcatagggatcattggacatacctcattattcctctgcattatttcttatctaattagccaatagagacaagatgctttattcaaattaccctccctttgagggatatcactgtaaagtgcacrtaagaattctagtaaaccaggccaaggagagaaatgcctgagataacactcccctgcttgtttcttctgttctcctattcagactggaagcattggctgggatcacattatgttttcatctattcagtaatgtgaaagcttggatcttggaataacaaatgtgcttaactacccatggcataccacaaagaacattattttgacatatatatgaaaactggaaatataaattgctctggcacaaggaggacactttatctctcctagaagttaacagtagactactccaagataacttttcagagcactgcattttaataattctccagagtccttggcattagtcagaaattatcttttcttgcagtggcatgtctaatgtcagtgtactgcaaagagcttgcaccactgctggaacttgtatgcttattatagatttggttcattagctagaaaaaaacattaacagccacagtatttccttccattaagaataagcttcagctagtgtgtttcacaactctcatatgacagagtgccaagatgctacaaaaacaaaaattccactttgctttgaaaatagaagcatttaaagaactgtagaaatagctgttacctatttaagaggtcactggaaagactagtggtctggagaaaatgtatatggcaatgtttgtaaactgtaaagaattatgcatacatcaggcttaagtgcaattctacttctttatgtcttccacaaatccttgcatataaaaatactaagatgtttgtcaattgtctattatgttctgtccaaaggatcctgatagataataaatgacaaaatcattagttatatctcaataaacctaattgaaacatacatgtaaaatacaaaactccccatctattcttgatatactttgatatagtattttagcagggtttttgtttggaactatctaaatccacttgacataatcatttcctcatgaacggattttaaaaattaagtgactcaaactccatgataaatgcttaaagccttaaaatattgtttttcttctcytcacttaatctactggttgggttaggctcaaggaaccacagagattagaaagattctgatccaatatcactgtcctcttttatacacatgaagctgaacttagaatcatgaaaaattctgcarccaccgattgtaagaatatgaggctgatgttgcttcaaatgtatatcatgagcaaactgtttctcgctaaagtctggatgtaatgtttttctcatcagattgattgtcaagaccttcatttgatgtgtaacaagataaaacctgggaagtggtggactctgattgattttctgatttgccccgctgcatggcacagtcaacaattagattggttgtttcaaagccttttatttcaccattacgaatttctacctgtaaagaaacaagcctatggcagttgctgtggtgatcgtgcctatggctaggccccaggcataagcaaacacatactgtcctgacataccagtaactacaagtttcaaattttagtcctttgactacaaaacagaaaaagaacatgtaaacagtgagtcatttgccattcatgaatcagctttcagtgatgaagaaacaatgaatacaactattattattaatgtccttcttaagaaaagtaactcttatactatcaagggaacttctatggcttgaccataaacacaggaaaaagagaaactccggtaaaaagcattgttttgagaataaattaaaataaagcatttgatagggacacttacccagcaaaccaatcttctatataaagacaatgtatatatgcatttggtgtcattaatagcatcaaaaacaaacaaacagaaagtcttaaaagaaaaatagagagtgaactcatagaagcataaaaggtgaactcttaaatatattggattctccctgaaaggaggctttattatatgtctacacacattttacttttaagggaggttctaaccttttattagtagaatatttcaaaagaattcactaagccttttatatttaagcattactttttcataaaataaaatctatcmaatatactttatacacaaatattttggtcacagctcattattacttaattaaaataaattgccaacacacttataatttgatctaaattatgactcaaaagatctcacttttaaattagagtatcactcctataaatatgacattattctttgtttaggcattccttcaaggtagactaaaactgatttctcagaacttacctttttgaaagttatatcccaatgccctacaggttatctcacattatagcctgattgctagtgattgacaagagaagcccaggaatagccccccactgatgcacaggggaataaaaagccttcctccttccttggcccttaaggcagcattcagctcaccttgtagctcagtctcaagtttacctgagtctaatgtatgacaaaggaatgattcccatgattattgaaaagtctgacttctacctaaaatgctcttttcctcactttgtgatttcacatagagcactgattcatttgaacaggcaacctttatcagcatgaagccaggtttgggcctataagaacatagacagcactgtttctccccagtgtgtctttaatttcctttattacagcaaaattgagaagaggcttctggtgaaaacgtttgtagttctgcaggcagataaaagggtgtggatagggatcgggatttatttttgtttctcttctaagaagtcctctggaggttccatttcagcgctacctttgccaacggagtcctgcaatgacataccagactcattaaaggggccccatccttctggccagtcacaaggtcctcttgctgcaggtaccaggtttatcctacgtttctctcactatggggaactgggcaggccggttttaatattagatattctaataatgtaaataaagggcagataataacgtcctcactaggaaacaggattctcaagttagagaaaaaataagtagataattggatgtctaatttttttcttcaaatagcttctttttaatacttaaacaccagtgctgagactcaacaatttaaatggcctcatttcttctttcagtgctttggaaggtacaggaacagcatttcccaccttttatcccatctacgtgttctagttattgctccaaagtagaattggtatacacagctgattaaacaatttgaaaaaatgttctggttcatgcctctgccactacactgccttagagccttatatttcaagaaaatggtatattcaaaaaaggttattttctgttaagagaaagataacaaaaggagctattaaaaactttcaactacatctaaccattcatagttatgcatgataagggaataaaaaggagtatgatgaagaaagatgttcttttgaaacttgtattgctggggtgaaaaatggaatcgtggcataagatgtgtgggggaaaagattatagcaaagatattagcgctaaaacagagagaccaaggaagattagcttttatttttctatatggatatagaaatatggatatagcttttatatttctatacggatatactgttgagtgaacagaaaataaacagttgaacatatatttggatatgtggtcttaaaaagttaactctaacttcacgagtatggccttacaaacagacatcaaagtccttctaggcataaagcatgtcggaggaggcatctttaaaaatgaaaacaaacacttcaaagaacctatcccccggatactctcatagctgtaccaggacacacacttgtttttataacttaaaaataaattttttttaattatactttttagatcaatgctgcattcaatttgcwtgtagatctactgacattctgtctgagatgaaaagatacgagactacttgacaggcattcagaatttctttataatctcctgcttcattaggtaggaaaaaacacatcaataatcaagtatagatacttaaatgaaagaacattaaaaagttggtgaatttggctattaagtagtccatgtaattatcttttattcattcatttcacagtctgtgtcctatattgcttaattacaaagaaaagagtagactgctcatgtgtacactaactgctaaatgtgtaagcaaaygaatgaatgatcctgttctcaatccacgagaaaagaaaatattaatgaagagaatacaaagaaggcaaaaataggaggatataatcaacaaaattatttactaccctcttagtaaaacatggttatgaacacatagtataagacctaatttagataactcccatacttgatcttactcactatattcatactccaagttttttaaaaatatattacatcagatttaaacatctgcaaaaaatatactaatgatgaaaagtcaattaatgcaaggatgggagccctagagtagcctctgtatattttctaagaggctatgrtactaaaacattaaaacaacaatttttttggtgattttcagtattcatattctacagtaaaaagatttaaattgtttaagtatataattgtactgatatattacctctattcaggtgagaaaattcctttatccctatttataaaggtgttctttttaaataggaaggattcacatttaattttatcagatgttccttctgcatctgttgaagtgaccatataacaagttgtaaaacaaccattttgaagctgatacttttcatcttctatttaaccaagagaaatggtttctatatatttatgtctgaagtgttttcatctaagaagtaaataccaaactaggtttaaaagcctacagatctgcccttatatggccatgcaatttacttttattcattattcttgtcaagaaatataatcctcatctctttcatgcctaagtctttttaaattttttattacaatatacaatattcatggaacatcaattaaaggatgtatatgtattccgttaatytttctcatctttaagtttttgcttatattctttttagtccatttgaaacctgtatacttggaataaaggcttttgcarcttgtagaatgatttttttcctgaaacatgctttggtgctagcacctagaaatgctataataaacatctctatgaattttatcattacaatttttttgtacagatattggtgaggccatcatcttttatatcacacacagtgtccttttatgagacccatgaaaaaagttttatttacttgttatccccaagaaaagctgttcaggggacactgtaaatcttttaagtgactgtgcagttttaaaacatgtctgcaagttctttgaccctctttcaatataattccttgcccttgaatttggtctcactttagtgactcacttctaatgcacagaaactgatacaagtgatgctgcagaatgtttggaggttgggatataaaaaacaacacagattctatttatttctgcctgttgatttcctttctcctcctcctacccccacttcacctctattctcccgcccatctttttcttccttccccctctctctgtctctttgtctctctctccctcctgtccaacatgctttggagaccttacccaacatatataaggagttcaacttcaactacctgagccgtatagacatagagagagatgctctmggaatatcagattatttgttactcttgtgcraaaggcataataatggctccccaaagctgtccatgacctgattcctagagccrgtgaawatgttacattacatggcaaagggaaattagggttggagatggaattaagttcactaattagctgccctcaggattatccaggtggttccaaggaaatcacacaaatccttaaaaaaggaagagggaggaaaaagagagcagtagagagatatgactgtagaagaatggtcaaggagatggaatgtcactggttttatatatggaggaaaggggccatatataaagccaaggagccaaggaaggtgggaagcttctagattctggaaaacgcaaggaaacaggttctctcctagaacttccagaaaagaatgcagctttgctaacactgaggcctgataatgtctatgctggacttctgaccttcagaagagtaagataataaatttgtattaagtcattaaagttgtgataaattgttgcagcagcaatagaaaactatatacccttgttttaagtctctaatgtaagaaggctttcttacacattattttataaatgaaacagtgaccttgcttaatttcagttttggccagtaggaagctcactttgcagtatctcttatctccactctgttccttttttcttgatatgtttcctctcctgtgttggggttatttttgtatactatctcaaatctattttagagcagggccagaaataaataaataagattagctaaaacaatatatatgccatgaactaccagaacgaatgaagtagaagaaaaaaagagtttcttctcttgcctctattaaaaacacaacaaacccctaaaacagataaatcactatggagggcatcaactgaagataaaagcaaaaatacatttaattaatttgatattttctaaaaatatggaaatattagctcttctgtttttcaatttaagaacaataaagaaaaatttattatccaaaatataattaaaaatatatgtgtgtaggtacatatgtgtatatgtacctgcacacacacacacacacacacacacacacacacacacacacacacacacagtttcagcttcctattatatctggttaagtaagaggataaaggaaatgaaaaccagaggttaggagagaaaaacaaaaaaaaaaaaaaggaaaacgatttttaaaagttcagtgtacacacacatacacagaataacagaacctcacagagacacccaggagatagagaatcaaacagtaatacacataaaatgcatccagaaacagacaaacatagaaagaaaacaaagatactttcataacaacactcccagcacatgccttttggagacattctcacttgagatttctgttattacactagattttaacattctaaacacactaataggaatataatctatccctcaccwactgctctataaacttgctgaatccttcctttttcaggtcttctaagcttcagaaaccaaatcccctgaaggcagctcagcccctccaggttcctgagcagaggtagccactacagaatctatgtattaagcaaagccacaaaatgtagtgacctagccacagattcctggtgctgatctccacctggccacagttttccgctccctttcaatattataatttgtatattggacaccctgttgaaatcactagcccatctctgtgttttactttattactttggtggtaaaagaagtagcagaaaattttccttatgtaaggggagaagcaaatcactctgtttgtcaactgaaagtcagaaaaaaaaggaataaagatgagacttaagtgtacatgatgccgccccatcaaatttgcaagctatttgtttactgggaataaatgtagtaggacaaaatcttgggaattcttaagttctgtatctcataattagtttcttgtatctgtagaatggttggcatttaatgctcatgagaagttgctttcatcataatcaacaaacatagtacacagaattaagtaacactaagatatttccctccgtttgagaaagtaaggtctcctatgatctttggcatcaatagaaactcattatccttgggatagttccacccactgtcacataaatgttgcatgtgaattccattttatatcagtagaatgctttatagttcataaagcacttgtgcattaatcatatagaaagaagttgctttctgttcaggctgtttctatacaagtactgagcattatttgcagataatgtgcttcactgaaactgcactgaattgttcacgtaacagctgtaaatcaagattgactttttgaacctaactttgcataattcaacaaggtactcaacatcttctgcctaagcaggctcatgacttacaagaatctgcaaagctaaataactatccatgactgtctcaaaatgattaaataacaaaaaggttttgcattaacaaatcaggaatgagtcacttactaattcttctctgatcaagaagtgacagagaaggtgccatttacaaagagaaatgtcatgaaatgattgagttgtgaatttcatcgagttcccaataataagcaaatgaccacaaaaggaggtggtagatgggggaagataactgctattaaatactcgtttgtcaagagacaaatttatcagagtttgggaggtagatttagtcttagctcaggagaagtaatcagttctgaggctaatgagtatactgtgcttaatcatttcatcatatataagactgagcagcgtaaatcagaaaccttgttaagtcagtacatagttacatggtgctttaacatggcacaacaatgaaacttcattattctgctgaagcctttacttccttttcatatgtcctttggtacaattatttggaaagacagtgatccgctcctccaccaagttattccaccaaggttatcctcttagttttgtcctgtggttttggacaatagtaaacctttcattaacatgttttttttttccctaacttgagcttctccaaggagcagacagccttgtacctgtaaactctcattgtttacaccactcataaaagcaaatgatagtgatataggaaggaggaaaaggaggagagcaaatgtttaccaggttcttaccacacatcaggtaatttttcacacatttattataatagctatataggtaggttatattatttctactttactaaggaggacagatagtgaggtttggaatagttaagaacttgccctgggtcacagaaagtggcccagtaatggcataaactataacataaaacccaaactacttaattatcacattaataatttgcattgctagtgaagtttgaagtcatagaagatggtagaattgccatcacatcactgtaaccatactggagttatcataccaagctagatgagaaacttagccctgtggtttccacaaagtttaactacctaactttattatttagttattacatgggaatgtgttttatagcttcaattataccctaagttcatgaaaagcaacagctatgtttatacacatttaaaatttatcctttagtacccagcaaagtgctatccacattatcaatatacaatggttgaatcactaataaattatgtgatcttaaaataccccattcgggccagaaaatgtacctaaaatctagtgagtgtaaaattgtaatttttctgcaggctgaggacaggagtgagagttataatggccctgacaatgactgaagtgggggatgagaggtggtaactatggatggtggaaaggagaacatatgagggattggagatgcctaagagatacactttacctcattctatatgttttgcaggaaagttccaaatatttctatgagaacaaaggagagaatcagagatttccctggcctgaaacatatcaggctctcctgtaaacaaatggatgtcattaaaccctgagatgggaagggatgctattggcagcagcaaaaggaactcttcttcattgagtatagtgttcaggtaatttatccctcacagtcaatgaccctttttcctgcctaacttgttctcctctctaccttatattcctcatctccacaaacattttttcaccatgtatttttcagttgttcagattgaaatccaaagagccacctctgattcctctgtttacttcagcccgtatgtctaatcctcagctaatcttgacgtgttcttcagagcatatccagactccatctactgtagtttctttccatttccattctatctccctggcccgagtcaccatcattgcttccctgggttactacagaacccccacactggtgccaatgatcacttaaacatattaatcaaatcatgtcacctgcctgttttaaaccctctcgtggcttcctatcttacttaaagtaaaatataagctctgccatggtctagaatttacatagtctgatcctagtgcattctctagcctcatctcccactacactccacttcatatccaccagaggacccytttttcccttactcagacagaccaatctcattagcaccttaaggtcctgcttttctcgctaccttaaatacagaccctatgttctcacaggactacatctttcttctactcctttcttctagcctgggtsgacttccctgactacctgaaccctcatgcacacctaccccactgaaaccagtcaatggctagccccacacccccttctattttcttcagagtacttgccattaccatttatttatttatgtgtgtggtctgcctttatgtcctatttctggcctccacatccctacactactgttgcatacagactcaygagagtggggattcttatcgatgtccacgttgcctagaacaacaccagttacataataagagctgaataactatttctagatcgaatgaatcccaacagaagtcttagatgtttaagccctttctgaaatcgctgcttcagaatctactttcctagtgtgtatttattgagaatgcagttttttttttctttttttgagatggagtctcactctgtcgcccaggctggagtgcagtggcaagatctcagctcactgcaagctccgccttttgggttcgtgccattctcctgcctcagcctcctgagtagctgggactacaggcgcccactaccatgccaggtgatttttttgtatttttaagtagagacggggtttcaccatgttagccaggatggtctcgatctcctgacctcgtgatctacccacctcggcctcccaaagtgctgggattataggcgtgagccaatggtcccagctcaagaatgcagtttttacattctccagtgacatttgagaaaatatttgatatttttgcctttgcaaaaaaaggggaaaatatgtcacctacattttccttgtacacactgttttaatactgaggtactccctatgggaatctaacctcagaattataacatggggatgagagagataattgaaagaatagggtaaaaaattccatgttgcctttctggagaatgcaatagaatttgcgagcatgatatatgaccatacatgcctgcaataggagggtgaacctgcaaaaatgttatttcagaatattacatcgcaaagagctctaactctctttagttttgccacagggttttgaagattgctattactgtgcttacttgaaacataatcacaaataagaagcatgtggaaacgacagctatattaactttatcatgtacagttaagtattcaacacacttgaaagcactgctccttcattttcatagtgtgctacacagagaaacagacctaaaggaagagcctggtggagacatagctggactgaggtgaacaaggtaataaccagatgcccaaatactggaggggggtaatgaggcagtgattaaacactgggttctctggctccttgaataccaccttgaacagagatacatgatctagaactaccccaggcagatataactggagggaaggttcagttaagtttgtgaggtttgtttttccactttctttaaagaaaccatctctgctcctcacctatttctttctccctgctctcaggcacttcactctgaatatcctactcacacaacagagaaggcattaaattaagccctcttatgatattaaacaagagaaattatatgatgcttttataaaaggtatgtgcttttttaacacagggctcaagaaaattttctttaaactctttggtgttgctttatgcgtttcatcattgatgctcagcctattccaggctgtataggctgttggtttaggagatgtttccaatttcctctcaaatcttaatccatggataatgcctgtgggctctaactttttagaaaactggctctgatcccagagactctttttatataaggagaaagtacagattttcccttttcagatttattttcctattaatgatgaaaacaaacacagaaaaagaaagacaataaaaaatggaaaacactgatcttagttactttttgtcttttgctagcttttgaatttgtctggtcttgcttctctagttcttttaattgtgatgttagggtgtcgattttagatctttcctgctttctcctgtgggcatttagtgctataaatttccctctaaacaccgcattagctgtgtccagagattctggtacgttgtttctttgttcttattggtttcaaagaacttatttatttctgccgtaatttcrttatttacccagtagtcattcaggagcaggttgttcagtttccatgtagttgggtggttttgagggggtttcttaatcctgagtcctaatttgattgtactgtggtctgagagactgcttgttatgatttctattcttttgcatttgctgaggagtgttttacttccaatcatgttgtcaattttagaataagtgtgatgtggtgctgagaagaatgtacattttgttgatttggggtggagagttctgtagatgtctataaggtccacttggtccagagctgagttcaagtcctgaatatcattgttaattttctgtctcattgatctaatattgacagtgggagatgtttccaattttctctcaaatcttactccatggataatgtctgtgggctctaactttttagaaggctggatctgatcccagagactctttgtatataagaagaaagtataggttttccctcttcagatttattttcataattaatgatgaagactttaacactaaagtcttctactattattgtgtgggagtctaagtctccttgtaggtctctaagaacttgctttatgaatctgggtgttcctgtattgcatgcatataaatttaggatagttagctcttcttattgcattgatccctttaccattatgtaatgaccttctttgtcttttttgatatttgttggcttaaagtctgttttatcagagaccaggattgcaaccactgctttttttgctttccatttgcttggtaaatattcctccatacctttattttgagcctatgtgtgtctttgcatgtaagatgggtctcctaaatatagcacactgataagtcttgactctttatccaatttgccagtctgtgtcttttaackggggcatttagcccatctacatttaaggttaatatttttatgtgtgaatttgatcctgtcattatgataatagctggttattttgcccattagttgatgcarttccttcatagtgttgatggtctttacgatttgttatgttttttcagtggctggtactggttgttcctttacatgtttagtgcttccttcaggagctcttgtagggcaggcctggtggtgacaaaatctctcatcatttgcttgtctgtaaaggattttaattctcttttgcttatgaagcttagtttgggtgaatatgaaattttgggttgaaaattcttttctttaagaatgttgaatattgtccaccactctcttctggcttgtagggtttctgcagagagatccactattagtctgatgggcttccctttgtgagtaacccgacctttctctctggctgccctttacatttttctccttttgttcaattttggtgaatctgacaattacgtgtcttggagttgctcttctcgaggagtatctttgtggtgttctctgtatttcctgaatttgaatgttgatctgtcttgctaggttggggaagttttcctggataatatcctgaagagtgttttccatcttggttccattctccccaccactttcaggtacaccaaaaaattgctatgcacatcaagctactactgttgactttcttcacagaattagaaaaaaatgactttaaatttcatatggaaccaaaaagggcrcatacagctaagacaatcctaagcaaaaagaacaaagctggaagcatcatgctacctgagttcaaactatactacaaggctacagtaaccaaaacagcatggtactggtaccaaaacagatatatagaccaatggaacagaaccgaggcctcagaaataatgccacacatctacaaccatctgatctttgacaaacctgacaaaagcaagcaatggggaaaggattccctatttaataaatggtgatgggmaaactggctagccatatgcagaaaactgaaactggaccccttccttacaacttatacaaaaattaactcaagatggattaaagacttaaacgtaaaacctaaaaccataaaaaccctagaagaaaacctaggcaacactattcaggacataggcatgagcaaagacttcatgactaaaacaccaaaagcaatggcaacagaagccaaaattgacaaatgggatctaattaaactaaagagcttctgcacagcaaaagaaactatcatcagagggaacaggcaacctacagaatgggagaaaacttttgcagtctatccatctgacaaagggctaatatcaagaatctacatgaaatgtaaacaaattaacaagaaaaaaacaaacaaccccaccaaaaggtgggcaaaggatatgaatagacacttgccaaaagaatacatttatgtggccaacaaacacatggaaaaaagctcatcatcactggtcattagagaaatgcaaatcaaaactgcaatgagataccatctcacaccagttagaatggcaatcattaaaaagtcaggaaacaacagatgctggggaggatgtggagaaataggaacacttttacactgttggtgggagtgtaaattagttcaaccattgtggaagacagtgtggtgattcctcaaggatctagaaccagaaatgccatttgacccaaccatcccattactgggtatatacccaaaggattatagatcattctactataaagacacatgcacacacatgtttattacagcactgttaaaacagcaaaggcttggaaccaacccaaattcctatcaattatagactagataaagaaaatgtggtacatatacaccatggaatactatgcagccatgaaaaacatgatttcatgtcctgtgcagggacatggatgaagctggataccatcattctcagcaaactaacacaggaacagaaaaccaaacagaaaactgcatgttcttactcataagtgggagttgaacaatgagaacacatgaacaaacggaggggaacatcacacaccagggccggtagggggtttgagggctagcgggggttagcattaggagaaatatctaatgtagatgacaggttgatgggtgcagcaaaccaccatggcacgtgtacatctatgtaacaaacctgcatgttctgcacacgtatcctagaaattaaagtataatagaaaaagaaaagaaaacattacgctaagtgaaaaaagccaaaaataaaagtgcatacagtgtcatgtgactagagataaaggtagggtggtgatgtgaatatatgtgaagatcccttctcaggctgtgaatatggcattaagaggagtgggcgtgggccactgggtttatgtacacccagtttgggtggcacagtttgggggtgaagaggcttacagagtaagtgactccagttcaaagagcttatgtatctgaaggcagtttccgggtactccaagcttaggcgggattcacacttctaagacttaatgtcaacagtttctattggatgactgcagtcattctaccccagatgtcacaaaattgcttatatttcatgatttttgagttaaaagatggcaatattttatggttcaacccccatacaactgggaataagaatgggagtaggagaaaggtcactttttgactcattatacttcgcaaagccagctaagcttggcttataccaccaagttcttgtttgtgaagatacaaaacccattttataccttatactatgtcctggcagaagaggcatgttatgctttcacagtagtatctcagcctctgctggatcttccttcagtgaatcttgtctcagtttcaactgtgttaagaaggatgcatacaaagccactgccaatttctacaagaacttcacatacaccaagcaacagaacttcaaagacttactgaaacatttgaaagtcatatgaagtggcctctgttccctgagtggccttttttatctccttggtccccctaaccctatctctctcccattcatgctcctcacaccttcctcccaggcctcattctaagttcctctcccagtatgcatatcagttcagctcttcctggcttccaaactcccaattttcgtgttatcgtctgtcaggtacatggcaaaacaacttaataggatctaccatccttaaaaggcagtcagggttatcaataaatgattcaatacacatttatggcatactaatctgtgttcagcattatgttagattctagtagggagggaggggtatcaaacaatgtccgcaaatgcctcctggctgagaaattcagtctagttgggaggcaagtatttcataataaaagccatacagctaagggatacataaaagtagagctgaggcctcaagagggatggtggaaaaagtgcagtgtgacagcattttctgagctagactggacaggaaacacatttctttactgaaaatatgtttccaataactaccctttctccaaatgaaacaacaagaaatccaaacataccctccaaaactattcatctatgtatgccactacagcttatgcatttgaataaggtaagcactgacggagtttctgattaaaaagataactgatcttgtgcacaatattcaatatttgggcgatgggtacagtaaaagcccagacttcactgccatgcaatatatccatgtaacaaaactgcacttttaccccctaaatctacaaaacaatacaaaaatagttgctctttttttaatggtcacctaaggggaagaatatcgttaaatgtaatatgcagttcctaccagaagatgagatagcagggagtgagatagaatgaagatattaatgttggatccttttatatgcaaataatttttcttgactctatcatgaagtttgaatataccaaaaatttaagcttctaatagtacagattctgcaactgacttccggaccacttcacatatgaacatacaaatgacaggcagactctatttgccactgagaagctaagtttacattgctaaatcctctaaagcagaaaatagagctcccaaagctgacttctaaaggtagaagaaagtatagagaagtagttttcaaccatggttatatatgagagttacctggagagtttttagaatgcctgatcctagggcatcacccctgggattctgatttaactggtctgaaatgggaccaagactttttgtgtcccagggaagcttttacaaattaccgatccctgggctgcattcctgggtgtttccaattaagttgttctgaagtgacttccagaaatctgtgtttttcagtgtcccaagagcttccatgtttggccagatttttaaaaccattgatctaatgcaaaattgcaaaaaaaaaaaaaaaaatcagttgtttctaaaattgtaaagcgagtacayagggaataaaaaaaaaagtaataagattttttgtgctgtggcacgaagtctgttctacggccccaactacttcacaatttcctgggtcacctgtaaagttagtgttgacaacagcatgaagcactgaatgaagctccccttcctgaaccttcatccctaggaaggtaagccaaatgacttttactgtctccctgtttatggaagataacaaatatatgtcctttagaaaagcatgcctataattaagcagtcatctaggctggcagtagggtacagctcagtgactatctttaaacaaaatgtgggtatctcgctgtattcattgcatcaacaatagaacatagcaggctgttagaaaagctcccaagtgcagcaaaagagggcttacacagaaaagactgttgaagttctgacacagcaaaagaagggaacccaatgctatattttgctaaaaggtaaaacacattctgacattatatactcatgtgggcaaaacagtagtactacattactacaccattgactgagagagtctccttatctggaaataagggagatctaattccagagatatcacagtgggataaccatttaaaaagttaaaataatgtggctcattcctgtaatcccagcactttgggaggccgaggtgggaggatcatgaggtcaggagtttcagaccagcctggccaacatagtgaaaccccgtccctactaaaaatacaaaaaaattagccaggcatggtggcaggtgcctgtaatcctagcttattgggagggtgaggcaggagaattgcttgaacctgggagttggagcttgcagtgagccaagattgcaccactgcactccagcctgggcaacagagctagactccatctcaaaaaaaaaaaaaaagttaaaataaacatttatataacaacatagacaaataaaaacaattccaaatatgcatatttgatggttattcattagtaatcaaaaaattataaaatctcagaaatagaaaggatcttcagagatctcattcagccactcagccacccaacagaatgaaggataactgcactgaagtttatagatttccaataagcattggcacatcaagatagactaagggttaagggatctgagttttacttcattaggcagctatggaaacttgggargkcacataatttttcaggccttaatctcctcatctataacgtgagtgcgaatgaactgaactcagctttgatgttctgtcatcaaggtatgcaaatgtatgtcactctcttttagtaaatcaataatgaaacaaacacaacaaacaacaacctgaagtaatttacctggctatcaggaaatacctgaggtgtcatgggaaagaaaaaccacaagattctgttttatttactagttggcttggggaaaaaaaatgaaagaacttgcaaagtctttatgattaatatgcttataagtggtggtttaatcacagccacattgcttgctgatagtgtgctgcatgaaggaagacagcctgataaaattcttaggggaccaatcatcactgctgacattcatccagcatgacagaagaaatcactactattgagagttatgctcagcataatcagtgataatactctctttaaaatggaagtaagaacctagagtaacaatacccctttaggttaaatgcatctctcagaagagtggtttgtgcatttcgcatctccagcataagtaaaacatatttttatccagaaacctactgggagaaacatcccatattcagggatattctgttgatggcagtattatggctattcagtatatcagctgaagcaccacaaagtaacatgccatataacttctgttgctcagcataatttctttctaaatcttcatttatctgcagctattgtgactgtctgggaaaactatagatggtctcaaatatcttcctattctttggaggtcttctgaatgaacagtatctgtgatccttttgctttacacaaacaaaagacatctcttcagttattaagtaacggtttgaaattcttataattatattaatgcatttaagcatatagtcaatgtttgctttatgcttcatagttctatttagagaatamtgcaggatatttattgtcgaatgagagacaaggggtttaaacttgtgagtaatataaataaatcacaatctggttttatttactgcattcattctcagcagacttaattgaaatacctttatgcttttcaagtttttcctgtatgtcttccctattgagaaagtgaaatctaatattaagtaatgttccttcagagtccatgcacagaagaacacaaacgaaaatcatgaactcaattcaataactgaatgcatctgcaagtttcttagcttgtgacagtgtggtaacaaattctaattcattgggcttttttgttcttcctccacagaattatggatgtactggggagctcaatttttgtcaaaacgaaacagctatcctttagtacatttaaaaagaaatcataccctagttaaaggactgaaaaataagctgaaaaaacacaactgaatattaaatctgttttgtcagttttgttttagtgtacagaatctgttggtaataaaacaatttgttaattggttgctctaggttatttggtggctaacctaataaattctacttctaaagtataagctcaccacttatttttgtcaattaattacatttcattcaagagttaagtttcttgcaataaatattaacataatgtgggaagattttataattttccaactgactgggaatctttgacaaccaaatgctgaacttaaattgaagaataactcaataggaaatacacaatagcagtgtcaagatttacaacaaatacactggaagtgttttaaaaattaatagtaggctgctatgcttggcttaattagctttctttttcatgtacaaagcatatctgtctagttttacgaacttggtctccagtcccctttcctaaaaacctgtttaattaaagtttaactgctgtgtacgctttagaaacagcagaatgattttttctcccttgaaatacttaatcctttctcaaaatatgatccttctgaatatatatttaaaaggcaaggggtgaggaatgaataatcttccaacagacaaacactgacagtttagctcatcagttccaggtatgggtagactgaaaattgtctcccaggccaccaagaaatccaaaaccaacatttggcatgagcagatttttgttcttcaaaaataaaatgtcagatagagaaaatgacaaatgagtaaatagaaaattaagtagaaagaaggctacaaaatactataaaaacactatacttaatgatttttgtaagacttttccatatactgctatagatatccagcacccaagtaatatgacaaataaggcaatgccagctatctttatcagtgacttgcaaagtcagtgtaatactttattatcaaacatgcaaatattttaaaaataatgacatatattgaccacacaatctctgaaatgaagacaacaattaaaggacagatggatgtgatgaatccctgaacagtatacctttacttatgagactaaaaagtaatactaatagaaatttagttcaggatcactagctaaggcatacagtttcacgctgtcccaactccagatttctctcctccaagggtttctccagcaatgctggcatgactactgtgcaggaaaatatcataggtatttttaggcccttttgacagtcagctccttgaaaagagagtttctgacttagcctcacattccctactgtggtctgtttgtggtacatgctcattcgatgtgtgttgaatatgcaccttgatacaagtgcaaaaccaattcatttttaagagaactctaaaaaagactttagtagagtgtatccttgttcaaaatatttgtttcccatccctgacagagggataggtgagtacatgcccaccctgttgatttcagacttggtcatgcagcggcttcttttggccaatgacatgtatgtggaaataatacatgccacttttgagtagaagcttaagatccatcccatcgttccaccatgcttttgttctccatctcccctgagactattaataccttgatagctttattccctgcaggaaaaaaaatatggagcagagcctcatgcaacccatggggaacatataatggagcaagaaaccagcctctattaactgcaggctattgagatgtgggggtagggtgttaccacagaagaagttagtctaagctgactgacacggggcccatttaagacttttcaataataaacaagcatatcctcatcccctttgctatgcagggacaatccctgcagcacttatgctgctggagagagaaaaatgaaaacagatggctgagactcatgttctttactacttgctttccttaaccttcagcaacatgaaaaactaatgttcagcaaattagagagtttacatttttaaagataaggagttgggattggtactaattggactaagttgaaatatttccaaaataaatagaatcatttcacagagtgatactcaggattgaagttttataaatattgcagagagctttctgcagtcattaaatttgacaaatacttagtgagcaaacccttggtatgctagatttcataaggcaggattgttctgggctccaaaaataagtcattgctccggacctcagggagctcacagatagagaaacacatgtactactcgttctaatataatcagatgtatgttacgtctgtcagatcaataaagtattatggaatcagagaagaggacaatcattcctgtcagggtaaggatacaggatgttcttagatggatggggatggagaaggatctgccacattcaggataaaacatgaacacaagaagataagcatgaaagtattttttaaatytggaatagtatagctcaagcacatagagtgtgtgtgtgtgcgcgcgcacgtgtgtgtgtgcgcgtgtgtgtgtaaaacagagagagacagagagagaatgagaatgtaggyagggtcctgaggattaaagagtatacactgaaaaatctccctcattctcctgaccctccagttccttctctaaaggcgaagttactcatttactactaactactagttagttaccagtttagattacaaagaaagtggaagtggactcttagaaaaatgactgggatggaagtggcagtcagaatctgacactttatgttaactaattccagagacagtttrctcatatacaagtgtatgggtgtttgtgtgtgtgtatatgtatgtgtgtacatatagatccttttctcttaaccatcctagagaaattctaacttatgaatgtactataatgtccttaactgcactgacatacatttagaatgttttctgtcctttgctcttataaataatgttataattaactcccttatacacattcctttgcaatcatgtgaaaatatacctacctgataaattactagaaatgaaaatgctgagtaggaattcgccaggcaaaaacaaaacaaagggaacaagacaaaaggaaggtgctttctacaaaggcaacggtatgcaaaacgttacatagctgccaagaaaatgcaaactataggtatggccagagacagtggggagaatgtggctggagggatactccgaggccagattgtgaggggccgcatctgcagggctcctgtttatggaaggcataatgagattaacattttttaaaamgcaggaatgcataataagattaacatttttaaaaaagcattcttgtggaagtgtgaagaatggattggcatgggtaagaaagggaaatcagttaggatgcagccacagtaatccggggaggaaataatgaaggcctggtaacccatcttcctgggctctgtgaaggaaaatacccacctcgcttgcttcttgcactttccctttttgggagacctcaaaggccagtggttaacatgcctcacggtaaagtatctgccactgagcatgactcagctatgggatccacccctgtaccccggagtgggagaacagtcttccttctaccaaaatgtatgtactgacagcttccactttttctatagaaaaagtaattattatagaatttaggagctggaagacatggaaatcatttagtccaaaggtcctcagattattgtcagccgctttccatttttctaaagccttgtaatcacggagaggtcagagattgagaaaaaagtggaaatgaactcctaaagaaacaattagggtggaggttgtgagcagaatcagaccctttactttaaagtacccaaagggaataggaggacctgacaccatggtgtgttttcccaccaaacattccaaccaaaatcctaatgctgggaatttaagcttaagcacggagacagtggcagctcacttgaagacgactttgagatttgtgatctagaatgttccaacctatcctgtgggaagatagcaccattttatacctgattaaaccaaaatgtaaacaaattaaaccactcacctcaaattcaagcagttaattggtgasaggccaaatacgaaaacaggttctcaaatttcagcatgcatcagaatcacctggagtgcctgttaaaacctagatttctgggccccatctccaaagtttccgattcaaagtggagagagtgagaatcaataatgtattaaatacatttctaacaagttccctgctgactctgatgcttctgatcacacttagagaaacaatctactacaacaatgccacccttcatgtggtagttacgttgcctatagaatgtatatagacatatatatggtcctctacaataaagtatttctaggttttttaaatttaaaatattgagacaaatatattgcaacatttacagtaaactcccatgtctctatatctctaaaacccaatagattaatattaactcactaataactacaaaaccaacaggtaaatgtatcaaagttatgccagatgtttcaatttctagagttctacttcagggatctaaaaccaccaaaaataagattatataacttaaaaattattttacctttgtttctttaaataatctatgagaatgagtagaactaaaaggcaaatcacaaactgaagatatatttgatctaaatatgacacgacattaacatattaaaactgttaagaaaacatttaataccttttttttttttttttttttgagacggagtctcgctctgtcacccaggctggagtgcagtggcgcaatctcgactcactgcaggctctgcctttcaggttcacaccattctcctgcctcagcctcccgagtagctgggactacaggcgcccgccaccacacccggctaattttttgtatttttagtagagatggagtttcaccgtgttagtcaggatggtctcgataccctgacctcgtgatctgcctgcttcggcctcccaaagtgctgggattacaggcgtgagccaccgcgcctggcctaataccattttttaaaatggacaattctggaatagcttttacaaaaggaaataaaaggataataaatgcataaaatattcattcttttagcaatgaaaataatacaaactaaaacaacaataagaatttttttcacctttcatattagcaaagattaaaatgatttgaatactcattagtggcttactctacagtgaaattttcgtacatcgctggggaactttcattatcataacctccttgatttccttccactttattgttaaggatgttgcaggttttaataaaaaataggcattattttttgaaagtcatgtgagaatactagggctcaggaacattataaagctaggagtcatttcaattaccatcatgcagtaaacattctcttgattttaatgatagctgtattagatttagaattcaggcttcatttacataatcctcaaaagacggccccagaaatccattaaaggtcaccttactttcccatacataaaccaaattctaatctgttcattggtctcctcaaaagcatattccagggttttgtaaagcttactgcttattatactttcatctcaaatagaaaatctttccattttggctttccatcctactaaactccattccagtatgtattactcactcctcttcatgttacagtaaaagattaaatagtygtttactttttgatgtatgtaaaattgaaatctaggcttcagaagtattctttggaagtatcagtacacctagagctgaagcagcgtgggatgcagcaattttcactgtctgctcctggcttcatattaaaatcaggtatcacacagtggtcagggaatataatttatttgtgtaataaacaaagtagaaaatctctttgattcccagatgtccagttgcagagcccaaagttaatgacttgctgctctccataccccaaatatacaggtttcactacacaatttactcttctgaaagaaaatatcaacaactgtcagccccctaaataaggaaaaacatttaatcattttcactcaaattctcatttgaatcccaaccaggaggatgatcaatttcaaaatctgattagttctgctgaggagaaccattcagactctcatgcaagattactttgcagaagaaaactagagatactttttttaaaaaatagaaatctatcattaatatttctttcaataaacattttccaactctataaaacagcaaacagattttagtttcatatcaacatttaaatatggaaataattactgcttgttcctgacactattacatacataggtatcactcacaatgtgttagataatatttgaatattttctataacaatgaatgaattgaggaattaaattgcttttttaaaagttattagctccattttctctctactattggtttggtccagcacagtcagagcaagctaaaatagccaccaaaacataactggagttgggctgggcttataaaagaagctataaataacatggaatagtattctgatacagaattttctcaactgcagctattccttttgtgttaagaagaaactgtttgggcaatgaaatttagtattcttttttgtgagctttgtcactgctctccagttaaggtgctatgcagtgttcttgtagtataatagctcttcccccttgtgatattaattttaggtgccaatttaactggattaaaaattactaagagaactggtaaaggtttatttctgagtgtgtctctgcaggtgtttccagaagagattggctttgagtcagtgaactaagtggggtgaatccaccctcaacgtggacgggcatcatccaatgagctgggggcttggatgtaacacaaatgcaatttcctctctctcctagagctaggatatactcttctcctgtccttcaacaacagaactccaggctctttggcatttgcaccccacaacttacaccactgctcccctgcccccaccaggttctcaggcctctggcctcagattgagagttacaccgttggcttcccttgttttgagacatttcggcttagactgagccatgctatgggcacttcagggtctccagcttgcaggtggcctgttatggcagttctcagcctccataatcacatgagccaattctcctaataaatcccctctcatatatctgtacatcatatatatgtattggttttgtctctctgaagaactctagtatatccatccaacttaagacatatatcttcatggtctaggtgtacccatgtggtttctagcaattcaggaaaatctcacttaaattaacaactcaatattttctcttttgttgctctctgcctcaaccaatatataactaacaaatccatggcttttagactaattcctctcttctgtttaaactgttggccaagactaaaaataagttttgtattttctactgatttccaagttaaggaaatgaaagtagataatatagcccacaggtcagcaaaactacagcctatggaccaaatctagtccaacatctgtttttgtacataaacttttattgggaatttatttattttatgtgttgcctatggttgttttcatgctacaatatcagagttgaatagatttctcagatagtatggcctgcaaaaccaagcctatatactgtctgtctttttaaagagaaagtatgctgatctctgctgcagagacaagaaaaawatattaaaaaaacartaagtgcaatttcttgccaacacgtcgcaatatgcaggaagaagcaggttaagattagaaagatacagtagatagcatttgagtacttccatggaaagttttaaaagtatttacactagaagtctaacacccaccattatgcaatatacccatgtaagaaacaagcacatataccctatgaatctaaaataaaaatttttaaatcccctgaataatgagggaaaaaagtgtttttgtatacttttgcttatgttgcaggctgcatgaaatcattgcaaaaaccactgtcatgaagctatttcactacgtttctttctagacgttgcacattttcaggtcttactttttaatctaatcaactttgagttgattttttgtgtggtgtaagataaaggtacaatttcattcttctgtgtctggatatccaggttttttcaacatcatttgttaaagagactgacttttccccattgtgtattcttggcacccttctcaaagatcaattgactgtatatgcatgggtttctctcagtgtctctattctgtttcattggtctataggtatgtttctatgccagtaccatattgttgtaattactgtagctttgtaacatattttgaaatcagaaaatatgttgcctccaattttgttattctttgtcaagaagaaaaggatatactgttgtttgggttattcagggtacactgttggttagaatgcaaagtggttcagcttctatggaaaacactatggaggttcttcaaaaaattaaaaatagaactaccatatatgatccagcaattctacttttggatatatatccaaaaaaattaaaatgagaatatcaaagaaatattagccttcccatgttctttgcaacattcttcacaatagccaagatatagaatcaacttactgacaatgaggggtagaatgatatagtaatggtgtgttatacttggagtagcatgacaggaagtgcagtcccagctctgttccttacaaagctgttgagttctatgagtttgatgtatttttaaccatttccgtagacagatgaatggatacacaaaatgtggcatatatatatatatatatakatatatatatatgtatatatatgcaccaagttcatgtatatatatgccaaawatatatatatatgaacttcaaatatttttcaagtattagtaaaagggaatcctgtcacatgcaacaacatgaatgaacctcgacagtattatgctgagttaagccagttacagagggacaaacactgcatgatcccacttacatgaagtatctaaaccactcaaactcatagaaacagagagtagaagggggttaccaggagctgggggaggtggtgatggggagttggtaatcaatgagtataaaattaggttaagcaagatgaataagttctagagatctctgtacaacattgtgcctatagtaaacaatactgtattgcacatttaaaaatctttcaagagggtagatctcatataaagtattgaaatcacaataaaaaaattaaattaaaaaaacttttaatttgtttgtttcttccaactttacaatttacaaaatttagagctattcattaacctgggagaacattcatattatttcaacaatcataacaaaaatttgataatctaaaataggcaaggcattctgttaagctctgaagaagccaaacggaaaattagtcaataataaattaaatgttcattgtgtgttaaagctcacaaagtattgctgcatgtatatatggkgtgtgtgtgtgtgtgtgtgtgtatgtgtgtgtgtgtatacatatatatatttaattttatttggtcttcaaaataatccagaaaatagagagatacaaatacatcaaactcagaaatcaataactttgccaaggttacacagctttgtatggaacacagcagggactgaacttcctattgccttactccaagcataataacaccatctactatatcatgctattcttcattgtccataaacagctaaaaaatcttttatacacttttttaataaaaatgtaaaagcatccataactaattaaatcaataacttgaatgtatctgttccctacataaaattcttcctcccaatatcttaaaagagaaaccccggtcaacgttaagttaaacaaggttaactgaagttgcacaaaaatagaagagctgtttcttaatattaagtaactgttcaggctgaaatattcaagactctttctgacatgcttctgaagctcagctaaaaacagtgggtattttaaaagacaatttgtaagcttcttactgagataattatacttacatgtcctttccaaatacttgacagacttacattaccattgacagagaaaaaaaacataaattaatatttagatcaaaggaaggtacaaaagttactgtttctctatatcactacttggagttcatacctttagaaagttatgctactaagagatgtaattgagccagcagtaaagaaggctaattaacccatttatgctagagtttgcgattttttgaacttttgcatgagtgaaaaatcagacgttggcaataaccttcaggagtagtacataaaaaactcccacacatttagcattccaataatggaacactgggcataagtgggttaatacacaaatgcactaaccagctccaagtgtgatctgcttcctgctaggaaacaccagactccaaaggagaacttcataatgtccatctgtattgggggaaaagctgaggttcatggtagaactaaggagtaatgttccaaagccagtccaagaagtgggaaagaagttttgtcaaaagtatcaaaagttagaaactgattaccatcttcagatagaggcatggagatgtggataaggataaagctggattagtcatcctgctaggctctgtgttgaagagattcttcctatttaagctaagtcaatgtgtttcccatcttaggtacctcagttattttagcccatggactacctagagaggacatgatggttctaatatttcattttagatatagtgagtttaatataaaaaatattgaataatgaggacactattcaatattcattctccttcccttacttttctgtacatttgtctagatcacatatcattgctacccaataatatagtcatgatatcttggtgtatgctactgctagtacgattccaagacttactaagcaggcaattctggaattgtcatgtcttccaatacctacctagcaaaggtatgctagtgtaacagatatggggaactccccacagataaacatctgattccttagaaatatatttcaagtgcatattttcattttggaatattcaagataaaatctggtataaaatcaacatttttctaatctttttttatatactttaagttctggggtacatgtgctgaatgggcagttttgttacataggtatatacatgccatggtggtttgctgcaaccatcagcccatcacctacattagttatttctcctagtgctgtccctctccttgtcccccaccccccgacaggccccagtgtgtgatgttcccctcccctgtatccatgtgttctcattgttcagccaccacttaatgagtgagaacatgcggtgtttggttttcggttcttgtgttagtttgctgagaatgatggtttccagcttcatccatgtccctgcaaaggacatgaactcatccttttttatggctgcatagcattccatggtgtatatgtgccacattttcttaattcagtctatcattgatgggcatttaggttggttccaagtctttgctattgtaaatagtgccacaataaacatatatgtgcatgtgtctttacagtagaatgatccataatcctttgggtatatacccaggaatgggattgcgggtcaaatagtatttctggttctagatccttcaggaatcgccacactgtctaccacaatggttgaactaatttacactcccaccaacagtgtaaaagcatttctatttctccacatcctctccagcatctgttgtttcctgactttttaatgatcgccattctaagtgacgtgagatggtatctcattgtggtttttacttgcatttctctgatgaccagtgatgatgagcttttttcacatgtttgttggctgcataaatgtcttcttttgagaagtgtctgttcatatccttcgcccactttttgatggtgttgtttgcctaatcttttcagtgtgacatagactagaagaatatataccagacatatgtctggaggtgtgattagcgagagagaaatgagaccttttctttttatgttttatgctttagtgttgtttgaattttccctactaagcacacattatttttgcaattaagaaggaggctacagatctccttctcatctgaaactcctacacaaaatttgtctccaacacagctgggccactcaggcccaccagatgttcctgctaagctccaggggttttagtgcatcttcatagtggcaattctcttgttatattccttttcttttgttgcctttgttgtctttccaccagactataaactttaaaagggcaagaattaatctttggcttttaatatttataatcccagagacaggaacagtgtttaacacacaggaaatattcaaggcactcaataaatcatgattaaatcacaacaaaaactatcgctatctgatacttactgaacacatttaagagccaggcactgtgttaaccaaattatatccattatttcatataattctcaagaaagcaccgtggagtatacactattacaatttccattttattgatgaggaagatttaatttacagagttaagtaatttgccaaagtggcaaagctgggatctgaaccaaggcagtttgagttcatagtttgtgctcatggcttctacatcacaccaaataaataactaggcacaaataaataaacatgcaagattttcatagctaaagatgaactctattcacgagagataggtggactaaggtagaaaataaaaccattcaaggaaaccactgacaggggtggggagagtatcacaaaaataggtgtcaccattattggaaaaagcaattcaatctaaatggcctaatgactttctacagctgtcacacatgaaagcgtatgccctatgtttgatgtattgcctccagaaacctccctatactgctaaactgtttacacaaataatgcgttttttaatcgacatttttcacatttattaatcttgatataaaatcaagattctatatataatcttaaatatatgtaaagagactatatatgaacttaaggtgactatctctctggtgattagaaacaaatacctattgctaagacatacagtttttattaacaattccatttttattcactgatacagcaatagtatggaaaataatccacctacaactttagaaaagaaagaaatatttccataaaggtataggttgtctactaatctatgattcttcagtaaggaaaaattataattctttaacaagaaaaaggtaagaatatccataatacactaataatttctagaggtaacatcagagggatactgatgatttttcacaaatggctcttatttggtgacaactaaacccttgtacagagcctaagacatttaattgwactgctcaatcccttgtctattaaacagcagcatyggtcagaccccaagcagtaaagacaggtgtacaatactattttaatttgggaaaattcagtgttcaaattaaaccaggctaaagggcttcaaagatttctgaacaccttctgctcaagctaccaacaactcagaaacagtgtacaaataccctctgtcctcaaaagaaccacctactggactcccatttgagaactataaaataaaactcttagctgccatgctctaaaacattttactcatcaaatatttaacagggtcctggacatgagtttcttttcatatctccctcctttcaggacagaaaccatctctaattattaatctaccaaaaaatgacataaatgaatgcatgatcttcaagaagaagagagccatatggatacattggcttctattattcagagctactgcaccaatcattaaaaaaaaagaatttattaaacaagcatcatttgtagttttactggggaaaactcaatttagttctgtttttcttcctataaagattcatcgtttgctggaacctaatatgattcaaccagctatgataggctaatattgatttccacatcttcaatagtacatttaaaatcaacaggctttgaaatgttcaatttctagtgacaaatggatttttttgctaataccagaaagttgtttttaataaattagggtattttgacattttacaatatagtccttagactcaaagacaaattgtcatttaaatattttgcagtgagagaagactcatgattctctatttccgattagtctgcaatatcaatactagttaaagaaagccttgtgctgtactcaccagcacaaaatgactgcgtcatgagcagtacacacttcttgacaacagcatcgatcctcccctgcctgattcctccctggagccaagaagtgattctgttttctctgaatacttcttggaattctcctgaacagtcaggcccatgaactaaacaaaatccaattatgtgaagtgatttataaagcagattacatttctttagtagggcaaccatttgtttctgcttgttttggcagtcccagtttacattaactccctcatgtaacagtaaattcatcttttttcactctcaaagtgtcctagtttagatgataagttatatggtcatcttcttcactagggactaaaaagagtccattcccttacttcattgaggttgctaaccacatggagcccgagattccaaaattctataaaatggtatttcaccaagacagaggaaaaatgatgctggacttcatttctgactgggcagagaagatctatgaaacagaaatacaagtgtcccaataaaaatgttgatgccttaacaatttcatttgtggttgcctcacattgacttgctggagtttagtgctttgcattcattttatggttttctaaaacaatgcttctatttgagtcataacaaattaataagaaaaagcaattaactaaaaataatatttcggtggaactaatgggtctaagtattagtagaatcagcttatttttactgtttgatgttatagataagcatacccatttgggtcmacattatgaaaatgactgcattcctagctatgagatccagagaatcaagcaattgccttgtgattttaatcaatgctgacatcaaggtagaaatttcaggccctccccagtctcatcttttacaacatttatttgtaaattcagctgaattctctgaaaaagtactctgaaagcctactttttgccttgtcaatataatctaaatgactgtgactataaataacgtaacgtaatacaaataatgtaactatttttatctgagtcatttaaaataacaaataaaactatcatgcatgtcataaacaaggacacaactatttctacaagaagctagatattattttctcaagagaaaaacactttgaccagtgatttgagtcagattatccccctttagtctattctccaagcagcagaaagagtgattctttaaaaatgccaatcagatcatactactccatggctcgccatccttctaaaatgaatccaaagtcctttctaggacccacaaggctctgaaaacctctcagatctaatcttacttcagtttccctccttcagtaaagtcccaaccatgctggcttcttgtacttccttgaactcacctatccattttaggtttgcatttgttattcctttggtttgaactctcctttcctcagagattagtatgactstttccctgtcttccttaattcatgagtctcttcaaacatctttttgttacagaagttttcagtgaacatcctacagccccagacccttaccatttctctctacccccttttctgctttgtttttcttcatagcacttcttacccatgacattgcattatgtgttatatatttgtttattgtctgcttctaaccactagaatgtaagcatcatgagggcaggaacactgtctcttctgttcacttacgtctctccggtatctagaccagtgctttttaaatgaatggcactaaggtctacacggtcagtgaactgattaaatgatatttaacctgatcacccaaaaatttgtgttacaatgttttaccctgtaaatctaaagtccaaaatttccccattgcacatgaactttaaatcaattttctctaaaacagtttttcatgctgtgttgataagagtataaacgtacacaaacctcttgagaggaaaatttggcagtatatattggaactaaaaataacaaccacaataacaacaataacaaacttgacccaatatttccacttttagctatctattctacaaaaataaacacacaggtgtacaaaggtatgtgtgcaaggatgttcattaaagcattttgagttttacaagcttgtgttatttccataatttcaaacaaatctttaaaagaagttgatttttcccagagagtaatgccaaagcaattctaaggagagcagatcacagttttattgaaatgtttttaaaggtaatgctgagcaaagtgactgctaattgtaatgccccattctgggatgtctcatcttatctgtcataccaacaagcccttaccaacaggttccttataagtacaaggtatgcagcagatgactggtctatctagccacagctgacaggaccagggaaggatgcctaccccaaaggtagtagatcagctggttgaccagctgtctgtcatgtggataggtcctagatctgtatctcaaagggtgatactcagatttctctcaggtaattcagacatgaggcacatccaagaagtcagcagttggcagtggggcaaaagccaaycaaagcacagatcggcaaaagcaatgtgcaaaagagaatgcaagtgacagaaaatggaagtcctgcaacactgtcattcccattctgcagtaaagctaggctgagccttggctcctactgccctacttccccaggtacccttaagtgctctttaagctatatttcactacatatctgcttttgccacctaaaggagtgtaactaccagaacattaaatggaagattggattaatccttcaattaatccttcaaggggtctaacctcaaatactactgaaacctacagtaagtataaataagtcctaaaaaacaggactgtttgcttgatcattttatgaaatatcaaattctttccaagaaaatatttttggtgacctatattttagtttagcttacctaataatatccagtaatatccagaggaaagatgggactgaaaaatccacagcacagaccaaagcaccttgcctgtcacaagtcaggggaccagtagactaagggcttctagtagttgacagcatatttttataattttttaatatactctggcattttaaaaaaattgagtcacagagaaaagatgtacatgcatcagtaaataatattctattccctacataccccttaacatttgacattgttagcaaatcattatcagactgtatgtgttcaattattaatataaaatccaggaagccaaggatcttcaggtgccaaagtttcaaagggaaagaagtttttaattttctttaaaaacatcaaatgctgaaaaatgattatttttgaatcaattatcaaatagttttagaggccacacagttggaaggtcctttatttacatttttcattgctacatgatagaggtgtaccaaagggggacagatagacccatatgaccctggtgtcaattcgcagactttacacatggggtgcagcagtggaaagagaggaggcagaccttttacatcatccaactcctgttccctcaactcccaactttgcatcattaacccttgctctggctctgtttctgctgtaaacccaatatttacatgtgctgaggaaagcaacaacttgtacttttcctcagaaaggtctgttgtaggatttctgattgcacaaagcattttatgtctgatcaagcattgcagtttcacattgttgactgttcagctagtgaccaataatgatccatctgagttaaaagctgtgttatctttggatttataatataaaatggatcccttggtattcctaatcctgttagattgctttatgtagatgaaatttttgcctgctttggtgctgcattcttttgggttttaaaaatagctttattaagatataattcatataacagagaatttatccatttaaaatgtacaactcaatgtttttagtacagtatgttcacagagttgtgtaaccatcaccacaatataattttaggacattttcatactcccccaacacaacaaaaaccttatactcattagcagtaactctcatttcccttcttccatacctctgggaatcactaatctatttctgtttctaggaattcacctattctggacctttcatataaatggaatcatacatatgtggtcttctgtgactggctttcttcacctagggtaatgttttcaaggtttgctgacattctttgaatgggatttgcaycgtatctatatactgttttgcaaatactaaaaatgtattttggatatttgtgatatatatcaaatggctttctaaatgtactgctcttcccagtttctgccacaaagcaaaaggctggataggctcttgaaaaaaaaacagtcaccaagttcttctagtttagaatgtacattctataagaaatgatagctaagttattttatactaatagacttacccctgactaaatcatagcattatatatcctcccctaaatgctcactccattaaaataatcaaaatcaaagaacctcttataacttaaaatataaacaacccaatacaaaatgtgcaaatgatctgaacagttatctcacccaaaaagagatatgaatggaaagtatgcacatggacagatactcaatatcactagccttcagagaaatgcaattcaaaaccacaatgagattctacttctcacccactaggatggctataataaaaaatattcacaataccaagtgctggcaaggatgcaaaaaaaactagattccttatgcattgctggcagaacatgaaatgatacagccactttctaaaatagtttggcagtttcttacaaagttaaacatgaacctaccataacactcagcatcccacagatacagttgtccctctgtatttgtgggagattcattcccacaaatatagataccaaaatccccccacagataccaaaatccacagatgctcaagttctttacataaaatgatgtagtatttgcatataactatgcacatccccaatatcctttaaattatctctaggttacttattcctaatrcaatataaatgctatgtaaatatttgttttactgcattgtttagggaataatgacaagaaaaaagtctgtgttttttttttttttcagtacagacacaactatcatttgttttctctctctctgaatattttccaccttcagttggttgaaatcagggatacagaacccatggatacagagggccaactgtatacccgatagaaatgagaatatgtttccaccaaaagacccagatgttcatagtatttataccaatacctgtagaattactcataatatccccacactggaaacaatcctaatatgcatcaagttgtgaatggataaacaaaatgtgataagtctataaaatagattatactcaggaataaaaataaactaataacatgcacaatatagagaaacctaaaaaacactgttagcaacagcaacaaaaaaacacagacatcaaagactatatattgtataattccatttaaataaaatttctggagaaggctaaactctagagactgaaagcagacctgtggctgtctggggttgggagttaaagtaggagtttaatgcaaatggacaagagagaacttttgaaggtaacaggtaagagaagtgttcaaaaactagattgttgtgggggttgcacaattgtatacatttatactaaaactcattgaactgtatattttaaatgggtgaattgtatggtaaataaattatacctcaataaatttttaaaagaccttcactgatatcatgtaggctactaatgagcactcaatcctgacatgaaaattgttgctacgaatttctacagcaataagttctcayattatttggtatcaggactccttcacattttacaaaataattgaggatctcaaaaaacttttatttatgtggccactatttaccagtaattatcacattagaaattaaaatagaaaattgttttaaaatttcatttattgattcaatttaaaataccaataataaacccttatgttaacaaaaagaatacgatttaaataaaaattatagtccttttccaaaagcaaacaataaatagtaaaaataatgattttttttttttacatttttgcaaatctttttagtttctggcttaatagaaaacagctggattctcatatctgctcctgcattcaatcaactccaatattacatatctggaaaattccactgtacactcacaagagaatgagagtgaaaaacggcaagtaacactttagtattattaggaaagtagttttaatctcataggcccccagtggggatcccctgggatcctctggccatgctgtgagaactgctagcctagaatctgctctaaaactgactgaggttcatttcagtgakattagttaatatgtgtactatcattaatacaaatactttaggatcaagtttttttagaaaacagggtcagaaaacttcctcaatgtagtagtcaaagcattttggctaccacattgtataggcctggctacaacttgtttaaagaaagcgatcacaatgagacacatcatgccacacagtatttacttgctgaatgtcaacaattgttcttgatttatcagcaagtacaataaatacgacattactaaaggctgcttaaacacctgattgttacaatcttatcatctaaagctttcattcttgtcactgattcggaagtttctgtttcatatccttttcagttttctcccatctctatgagtacaaaagagtcctcttagtttctgcatttgcttctaaaatagttaaatgttcttgaatttttttaaatgaaccttaacatcataatcttaatcttaaaatagtcatgctacttttaatatctgatcaataatgatttaatgatcattttagactatatggttaatttaaattaatatttatcctatacttcacaattaaagaataacaatatgatcagtaagtttatctatattccttacaacctgaaaggttaatgatgctcactaaagatgtaccagctcatttggaatgtctccaaaactttggccctcatggacttcagatgtatttcccaagtaatgtaggtaacagaactctagatatttaaaacttgaactcagaaacaacagtaaatacytacctgacaatatctccttcaagagcaatcactctcttaatgatcttctgttctgggtttttaggagacctagaacaagaagataacattatacaatcagttatgtctatgttgttttaggaagatgaaaagaaattctayaacaaaataggctatattaaagtctttacagattcctttgcaccccatgacatgacatcagtctcacttcggttccaagtgacatgaagtgactactgaagtaattctcattttaaataaactctgggggggaaaaaagccatgttaaaactttacaaaaataaaaaatacagaggaataaaacattttcttattaaggaataaagtttattattaaattattattgttgttaaagataggttctgatatggtttggctctgtgtccccacccaagtctaatttcgaattgtaatccccatgtgtagagggaggggacctggtgggaggtgactggattatggggttggattccctcatgttgttctccctcatgttgttctcacgagattttatgatttaagagtgtggcacttccccttcgcttgcttgctctctctcctgccgccatgagaagatgtgcctcacttccccgtatccttctgctacgattgcaagtttcctgagaacttcacagccatgtggaactgagtcaattaaacctcttttctttataaactatccagtctcaggtagtatctttatagcagtgtgagaactaacacaagtacttagaggaaagaggattagtacataagaaaatgcttacacatttctttaaaatgataacatacttcagttttttaaaatttcatttaaaattaagaaaggagtttttatttaaatcccataaaaacaatgaagatgcgaagcatttcctttaaaaaataaagaattagagaattctttgaaactacatttgggtttagccatttgatgattatagaattcagagcgctaaaacagggctactgacagttaaaataaattgacaggttttgatatacttaatacagacatcatttatttcaagctacttgattatggtaaattttaacttagagtaatactctgtactctaaataaatctctgcctctcctggtatgtatatcctatgcagttcctttccagactgtgataggattcatctgtgaggtcaatagtttatggtaaaactgatggtgcatcacttttgagattatgttataaaacagacttacaggctctccctctttctctccttctctctctcccctccttccttcctctttctattttttcctccaacatctctttcatggatcactctagaagtctggtctgtcctgagcagcctaaggagagactcgtggtgaagaaggaaggtcggctaacagtcacattagtgagcttcaaagcamgtacttagtcaagtcttcagagactgtggctctggtcaacagtttgactgcaaattcgtgagagaccttgagtcagaaccacacagctaagatgcttctggtttcctcaccctcagaaaatatktgagataataaacgtttgttgttttaagatgctagacattggggtaatttgtcatgtagcaatgggtaactctatcttaatatggtcaatttcctgccaataacattttaagtcttttgatttaacagacgcatttcaagaaacatctcatgcatcacacaaatgatcatttaatatgtatttcaaaatcatgcatagataaaaatattttaaattcaagtcacattttgaattgaagtactttttaaaaggaatgtaaatgtgcaaaaactgaaaagatcaaatatattcaaactgtacatttcatcaaaggaaatgtgcactttcaataagatttatatttcacaatatgtcttgcagagaaaatgaaatcacgtaagctagttgcatttatttgtaacaattagtttcacagtttttcactaagttaacttttttattttaaaatgaaatttgatcagagttttgattggcctcatccctttattaaatcaagtaaatattatatttctataactttaatgtcattaatgtacagctgaagtgaggggtatgggcatattcaagctaatgaaattaagatactctctgcagggttacttatagaccttttagaaaagtgcccctcccatgtctcctattttaaaaactaggaaagtataaaatattattcagcctcagtggtcatcaaataattgcatatcaaaataatggatattaaaacactttcttactatattgacaaagatgtactactaataataaaaataaattgctgttgagggattagggacattggtactctctatataaactgtttggtcatgtaacatgcctttctataacacaatatcaagattttatattcttttaaacataataatcatacttccagaaatgtatcctaatgagatgattacgaatgtatgccaaattttggccacatggatagttaaagcattactgtctattttaaaaaagaaaaaaattcaacaagagcagacaggttaaataaaccatagtcccactcacatgataaaatacagtcattaaaaatgatgttatagaagaatatttagtgatatggaaatatcaacagaatgtatggattgaaaccgtatgttagaaaatattatttgtggcatgacttcacatctgtaatagcagagagagaaatgtgcatccatttttactgggaactaagcaagaagattctaaaacaaaaggaaaaggaaaagttctgtgtggataaaagctttcatgcccagatttttggtccacattattgggatatcctttagcggatgacaactatttgtgttatatgacattacccaagaagacatgctccaagatagaggtaagacctgaattaattatcaagtttactgcctaatattgaggtgagattaacattaatgaaataatataaaaagcaacmcctatcagtgtaaaaaatattttatgccaacaatgtttaagcttttgagattcttaaaaggtattctatattttaaaataatctatattttaagatcctgaggcaaaatagagtatgcaaagggagctatctatataattaaagttttacaaattactacttcaaatatatctttaaattttaatgtaatattaaactcatgaatctaatcaaataatttcagaatgaaaaaagctattactaacattaattccattactgctcaaaatctatatctatattttaatcattaggctgttgaatgcattactttgatctcagcakaagtgctcagagagttatacagatttacatcatgaaacttattaaacttctcttcgtcttaattttcttggccactttcctatctcctagaaaatgtgaagaataacaagtgaaggattatgttttacttgaggaatacaatggatgttccccaataaatactaaaatttacatttaaatttgtaagtttagtgttttcataataagtaatgttttacaatatttgtttctgggatgtggattttaaacattctgttttatgcttatgatttaatttggcaagatttctccagagacttggatgaggagcctagaattgtttctttactgcatgagtcttagcagctctgtgtggtatggcagagaatgtctgtaaccagaatggttgcaggccaaggagtggggtctaatgtagacataatagaatttccagtctctgtcactaatttcatgtttttttatgttcccaaaaagttataattttcaccctgttgggagcacttgaaagctactttggcatactcaagagacccctctagtattgtggggatggagagattagcatatgtcccaccttctcttttcctgaccacccccaccctgatcctggtgtcacataaataccttaaccctaggtctaagcattctcttctcccatttatgataaaattttaaaacttccctctgtgacttgggtagatttttatattcatatggttcagaattggcccagattatcacagaattaaagtaaccttagccacagtctaatgtaatcactgaacctttaaaaatactaccatgtattggacactatttacattgcatatatcccaagaggcctaaatctaatgctttattattgaggtgaaaggaaaaacgaatattctggggatggcttctattacaagagaatgtttttcactatcctaaaggataaagcatgcattaagccatataactttacatcattataattttaaaaatatatgtttttctattcttttatcatgaaagtagaacgaaaagtccactcaacacaatgataaaaagtattatcaaatgatagcttatcacctcctttccctgtcaaatttgaaaaaatgttgccagagtttagcatggttttcacaatggctagagctaaaaggctttggagtatatctggctcttcctctgcttcttttaatattgcccattctctattacccaaattttccacttggtgaccatgtgatggtcctcttgtgccctgcaaatccatggactggagagaaatggaaatagagtcttgctgttactattcctctctgctgtaagtgagctgctccctgtaggcaagctacataacctatctgggactcattttcaggaaggtaagattagatcagaaatcctaaaccagtggccagaccatcaaatctggcttacaggaatattttgtttgattcatgcattaaaaaaaaaaaaaatttggagctagctaagcaaataggagacgtcatataaatttatttctcttgaaaaaacaggtagatctggcaaccctagtagcacattcttgcatgagaaaagtccactggaggctgggtgcagtggcacatgcctgtaatcccagcagtttggaagtatgaggaggatggatggcttgagcccagaagttcgagaccagccttgggcaacatggtgaaaccccgtctctacaaaaaatacaaaattagccaggcatgctgacatgtgcctgtagtcccagttactcaggaggctgagttaggtggattgcttgagccaaggaagtagaggctgcagtgagcaatgttgacgccaatgcactccagcttgggcaacagagtgagaccttgtctcaaaaaaaagtccattagaattgagaagcagacgatttgccacagtcccgccagcttgtttcacaaatgtgtagtacctgagggcatatgagtctagaaatcttgaaaaatgttcctacctagagcatcatgtaactagtgagagaaaacgcataaaaggtctagcaggaattctatcacatcgtaggtactcagtaaattttagacacccctttctataataaattcataaaggagatcaattaactgggcctaagacaagagttacaatccttttttaagacttacatggatagactatatttaagccctctaataaaagaattttcaggttctctttcatgggagaacaagaaaagcattgtaaaggtttggtcaacttttattacacaattagctaaagaaacagcaaaactaaatataactgaatccatattgaaaagcacaggtttattttaaattagataggtattatctgtaaaatcaagataaaaacgaataatttttagttttggattctgtacacttgcttcactatcagtagtgtgaactttgtacatactgcctcatttttaatgattcatttataaaattcaataccgtttcattaattagcactctcaaaatttttatgtaggtcagtagtatttcagctacctttttccccttgcatcatgtaaatctttcaaaattaaacaaaataaactatagactttagttgtttttggggttcattcataaaatcctctcaagcacggagctttgtagtttcagaaaatgatatatgtatatacaatgcctaacaatcacttttgtcctgatatccccgagaatgctcccaaccaagagcctcattactggcaaaatgacgtacagatgaagtggcaagaacccatgttaatgtttcaaatttgtcttattttctagaaggggaaggaaagatcatgggaaaggaaacctcaggcaggggctgaagatttttaagtgtatagaaaactttaatgaaaatagagtcaaatttcaagcaatgtgacttacacagtctcattttgtggggtggggatggaataagaaaggtatggtttatctacattggccattctctcagagcataccctacctgaatcaggctactaagcagaaatagaatctttcaggacactggagagattccagtcaggtttctagagacctaagaaggcagcagcagaaatatcacctttatgtttcagatttatcttctacaattccttacacaggaaaatgtattttaacagtactgatgaaacaacaacagaatgaactttaaagaactgaactgttgtttattgataaaaagtgttcttggttaaatgttggagttatttcactttcaccaaatgtgattaggaaaaatttaataagcaaatagtgacaactggtcttattagtgaatcagcctggattatgtaaaatcaattaaatttgtatttatgactctaacttctataattgaaaagagctgtgtaattgagtatttttgatcctgaaaaacaaatgtcttcatttaactatgaaaaacttaaggaatttagtataatcataacaataaattaatttccaacagtttgttaactcaagcatttcaaaacacagaatagtgcaatcttcaagtatttaatataattacaatttacctcaccatctagaataatttgtatgtaaatgaatatatacagcacagaaacaatatacagcacatatgtaaaatgtgtgtgtgtgtgcacatgtattctaccacgtaacatggagttatggcttttaaaggaactttaaaaaggatctataaagaaacttctggttgtgaaaatcatattccctaatttattttgtaaaacttgattttaatatattgaatatgcttaaagttgaacatatctgtggaaatgaaggacgtgaatgctaacataaatttacatactgactactstttcaatacagattcccaagtgcagaccttcatatagaagcaccaccgctctgttcccaaagatggacatgcactcggaagcattctttccccttagtcaagctaggtttcaacccctcatccaaactacctcactgagtatggctttgcatggaataccacttaacatcatggaataaaacaaaattaactgctcttccaaggaataaatccatcaatctagcctcataaccgtaacacttcagttaagctaaccagctttagatatttggtttcagtcaggttgggaaatagtaccacatatttttggtaggtttgaaggatattcataccacaaaacaccctgaaagagcaagctatttgtattttctatatcaaaccatatccattgccatctatatggcacagagaaggcaaaccaactgaattgcagaatgaatactagtatacaagaactgaggttgggacctttaagtcaatgtccatgcaaaatattagaagtacctgtagccacctggagaatgttattgaagaatggcacagcagtcagcttgtgcccaacacagcttactcgccagtttgccatgatatcagtgatattgtagggtatgagatgccaagcttagggtagaaagcatcttggtaaaagtgaagaaagtaagcataaggctagtcttgagcattttaccttcagcattttatggttaccatatgatattttttcagggtgaggaaagacacrgatgggaacggagacacttcagtggttgccagcattggggattgttagtaaaggaacctttacaactgagaatcagacaggccaacatgccatcccatggatgccagcaaggaaaggtgtccatcaaggtgcagggtccctcccctgatgccgtcacacaataaacttctggagcttagatgttgttctgacaagataaagaactataaacagacttaatttgttttgagttgcctcagaaagctcttacatttatcctgaattgaaaagcattgtttgcaataggacacttaagtcttgcttgcaataggacacttaaaatcagcaacagcaaaataaagttatatatttttgcatacctgatatttatggcctgaaaatttgtatccattccattgtctttattgcatatctcttttgattaatatgctttctagtgacaatcgagatatgcattattaatgtttaaactgtgctactggattcaaaatttcctagtaaaactgagttaggtgtatgtgtggggagaggtgagatgccacataatcaatgatactattgtaatttctcaaaaatgctcactctcctggagaatgctgacagtgtggaggttagaacataagtagaatatgaagtatcctgacacatttctgttccaaccctaatgctattgttttgcaaaagagctctcaggcaccagtaactacacacaatttactcctttgaaaaggtcaactttatgcccccaattgtagactggaatagtattagcaaattgtttccagaaaaaaaaaaaatacatgatgcttgggattttaaaaaatcaactcaactgatcacctctaaaaacagcattaccatttatttgctcagcttgacagccactcattcagctagctccagttgctacattatcagaaagtttttctatatatttaattttctgctatttatattgcaataacttgtactatgatagtttgtcaatgctttaacctaaataatactaaaattaaattaaatatctcctattcttaatgttatgcatatgtttctaagtcttccagtattacctttttcctttctgctggataaactacatggagctatagagaggggggaaagagctagagaagaggttaatttggaaaggatttttggcagctgagaataaatatcttttggagaatggaggtaagttaagaatggcaaaatttaggtcaggggttaaaaaagactgtgaaagatcataagggaactttggcaacaacagaagaaaaacaggggagatttacttccaaggacgaacagaagttatctcactagggtaaaccaagccagagaggtacagagcagtgagtagacagaaaaacacagccaggtgactaagaagagagagtgctgcctatggattccacaaagagaacacagaagcactgacttggagaagacagatcttcaaagttgctatgttagggttctactcatttaacaggcacctcagaatgagggaaagtttggttatcatgctgttactcactcttcctatgtttgtcctttcccttattaggttagcctgaaaaacttctattgtttgtaagaaaatgcagaggtcaaaatattcccagtcaatagaatagaatgatggttgccagagattgttggtggaggttgggggcagaaatggggagtggctggtcaaagggtagatctattgtacagtgtggtgactctagtcaataataatgtattatatacctgaaaattgctaagaaagtagatcttcaatgttctcaccatatacacacaaaaagataaatatatgaggaaatggctatgttagctagagttaatcatctcacaatgtgtgcatatgtcaaatcatcacattttatactgtaaaaacatataatttttagttgtcggtcataccttaataaatctggggaaaaattcctagctgccagtgttctacacatagaacaccaaagaaatccctttccaaaaatcacaaccatatctcaacctgtgatgcatcctttcaagaagctaaagattctgacctgctatttttagttgactgtacacagtcagcaataactataaaatttattgaggcatgtgtttttcataaaaacagtgagtatgttgaggctataatttctccgaagatttayctttttctattattctttagtacacacatcctatagccactttttttctagttcataaaatcttattccraataattaggtacccatttaaaatggaaacagaccatgtgtgcccgcccacaagtgttgttccttgcaggaagctgytttgattctaggttgaaagacattgattaatgtgagaaggcttgcctgcttttcagagcatcggtcccctaattctgtacacatacaaaatggactctaatctctacagctgtcatgttgatgctctttgtgagttgtacatttcacagactctgaaaccatcattccattgctcaaacatgaccaacaactttctttaaagaaagagtgggagattattaagtcaaaatggggccaaaccgtcatcttcatgtgtggacgaaatttgcatgggtcctgatagctatgtggttcccacagctgaagcttaataagtctctcccagacacaggtataagaaccattaatagtcctcaaatacctctacaattgagtaaaaataaggccaaaaagaattaatggaaataatctttaactggtcttaaatgcctgtgggttaaatgtaagaaggaggctttgatttaaataaaagcaacttctcagaaacatatgctcaccacccaccattcttcatctgaatggcagaaacttggggatttcgtttcactctaacatgggagctttgccaagagacatgggcacaaacatcagtgattaagaaagatctccagtatgaaatatgtgggatctaatccacattagagtgggtttgtaggcaatggcaccatgctttggaatgaccacatggatagatattttgatttacataacagtgttaaactctatttaaaacttttaaatagtctaaccgtattacctaaaataaaatgcctttctgaaaaagatatgaaatcaagtaaatacttctcacaaaatcctctgattcagtttcgttttaaaatatagagccccaaagccttactgatgcataccatgtctctcccaccctttatcagttctttctcaccgctgccatctgtttgccttgctttttccagcacaatgcccatccctccaggctgttcactggcactcagatgtcttcctctaattctttacatccccatccaagaaatgttccaggtcttttcctattcttcctcccaaagattttcttcagcaccacsctctgtgtattttggacacttattttcagatattatttgtcaattagaaaatatgcaagtttgcttttggccctctattttaaacacaattatttactgctatcttgttttgtgttatacgtaggagaaaaattttgtaaacatctcatcttttacaaytataattccttaagtccttataattccagtctttaaaaatataaatgcaatgttcagaggagtcctatgataaatatgtagttaattcaaatgtttcctggagcatcttatttcatttttgttaacttttaatatatacaagcctatctattcatagttacactgatctaatcacatgatcattatcctactgtagaattcttagttatargttaaaaacagatatataacatgagtttaaaaaataaaaggaaaagaaaggaaagtcaaaattataactctatagaaataagaagacaaaatgtatggtaaatgaccatttgaatctcttacagtacctttcaagctgtataactacccttctaaattaatatctcatttgaaatagttcccaaaaatccaatctagtcactttcaagtcaaagactcagctgtttagaatgcagactgtatcatggctgtggctatgtgtacttgacctcctgcctgttaacaaagagactcaattaattatttgctgttttgaatggctatttcatttcacctccacctttctttaagtgctgaaaagctcaattgctttattaccttaaccttagctttggagaatgcatgcagaatttcttaactgccaactaataaactatcttgatccagaaagttaattttcaggaccacagcttctagatgttttagtgctagagacagctgaagtaacataatgacctagtgtcatatcaccttccaagacagtctctttgttctgaatggtggctttggtgctaagctattcccttcatatgagtcaagagacacactagcactgcaatgggttatagtgtcatagtaacagtttagaaatcttaccacacataaaaaatgaatgttttcagtattaattaaaagtatgtaaactaacagtatatcagtttttcctgcttacttttagtcacattaaactcagtaatataatttcatattcaaatattggaacattaaactagaagtagcaaacagctttgaaataaatgtgaaaatggattttttttaacgtatgggcacagtagaactgatagcaatgattatctaaatgtgaaaaattaaccacaacaccaaaacagagtctgaaattcatcaaagattttctcatatcttttgaatttcttcagccctgataatatgtaacattttaaaaattctcatttgctacatatttgcttatctatatattaattctgattctataagtagaccataagatgatatgaaggtagtgttacccttctcattatattcagtcccaagtcagttacctgcacttataaaaaaacaagtatttgatgatgattagatcataatacatatacgaagatattgctatttagtatttcataaaagtgaaataatacaatatttgtccttttgtgcctggcttatttcatttagcataacgtcttcaagactcacccatgttgtagcatgtatcaaagtttcattccccagttaccattttcatgatttacactagtcattattttatgaatatccaaactgatttatcattccagtatgagtttcttataatctaataaaaatggcaactgagattttaaaaaattttataactcatttcttttcaagaatatttatacaaacatgaaaataaatgtgtctatagtcctcagatcttagtttatagatcagtggtcctgaaactaatttaaagtctagaaggttaggccctggaaatctagaatctgaatttgaacaagcacctaggtgattctgatgcaggaagtctagtccacctttgataggcacagttggaaatgctcacatgaaaattctatgaaattgaacatactggctccctacatgttcaataaagacccagccttaaagaaaagccataatatatttctaaaatgaccatgacaatactgattttaaaacatgtacaaaaatctaaaatttcctatcagggaaaaaactcaatattctaattccatatttaatataaacctggaattgaatctacaactagtatgaagcatcataactctaataagaaagagtaagacatcccatttccaaagttttttaaagaatataaaaacctcctcggatcaggcaaaatgacagacaaactgtgattttaacagaaaggctgtggtgttagggtacagaagaatttatttcttacggtcattaattcattcagcaaatatatgctgaatgacaagcaggtgccaggtactctgtatggtactagcttacaaaacacatcttattacaatcaatggcatgcatgctttttagggttcaggcccaaatactagctatatcaccttgagcaagtcatttagctatcttaacatctattttttcatgagtataaaaggatgacagcaaatgttactgctgatccccaaatattactgtagaggccccatgaactactaaacataagcggccgagcatctgctttagatagaatgagtctcagaatgagataataaattataatggagagttccatgggtctaattcctactttaagtaggaaagcagctataatctcaaactaaaaccacaaaatgaacttctcgcttctaagatgactacataacatttctgtgaagtctgtgttgtggtttattacacccagttagcaattctgccaccaaatagcaagcttgactctactttcaaataaatgccaaatgacttctctctttccttccctccctccctccttttcttcctttctctctctctctcttttcctctttcccttctttcctttctttttcctgctacctttcttcttccttagaaccttcttcataagacctttgaaataattaaagatagtacagatagattaagccacttttaggcccagtaatttgacaattttttgcattagtttatgagctgttaaattcgtagctaaatgtattcatactgggaaatttaattgctccagtaaaatgccgaagttccgtaaaccaattttgtgtggaaagtaaaggaaatctaattgtttcatctgttgtgtattttaattaattgttcctcacgaaaaactaggtaacaaaatgaaagcaataatattttatttaaaatgcccaagaaattcagcaaataattcatagaacatccttgaaagaaagcacaatttaaaaagtctgaggcataacaggtattcagaataagccactagaaagttgaaaaataacaatattagtccactacttagtctcatattcactgtttcaatgttttctttttaggatgatggactgtgccacttgttagtatatttgtaggcttttattccaagtactttaaaatactctgacttaattatgttaatattttaaaagagtgaaacaattttgcctatattttacaataagaaaggtatgccataaacaaatgaatatttcccaaaaaggcacaaattggattgttggaactgagaccaggactatgattgggaatctatccatctattaatcacaaaaatacattgtaattccttgtggtgcccattactatttgcaatgtggtttcacttaaaaaaaaatcaatacaaagaaacaggtaagtaacagtaaagaaaaattgatggtgacattctaaaattattttcattttataaaggctgtgtgtccacaataaattctaaaatgagataaaaagatcaaactattaattgcttaaaaaaatcctgtttaaaataagtttatcatctacactaaacattctgaatttttatctgagaaagaaaaaagtatttaaccccagtttgaatacattgatgattaacacaaaatccctatagaacctccagttaattttctaaccctttgatctctaaaattctttcataaacctttcaaagttgtataccaaaaacacgaagccctgtttaataaaaatggaaaaagctacaatcctgctcaattcaaatcattttgttttgtgtgacttttaaaacattagaaacatataaatatactttttagtaattcttattagaaatttatattatttatgggatggactatatagaaaattaaggagtttgaggtcaatcattagcattttaaggttgacacttggtattacagttagagatgatcatgatttggaccaaccatgttccagtaaagtgttcttcttgaacttcatatattttacatataacttttctggagtatatgtacaacatgaatatccacatgaatttatacagtatatgctaattttctctggggaagagtgtactatgttgtctggctatcgctacaaatttgtctgaagacattcctagtacttttattttcttactatttatgtctaaattttttctcaaatcccccttgattcatttataatggttagtagcattttagtatttatcttttctcattgttttctaactctacacatttttaaacaatagaattacagatgatgttttgtcatttttttaaattaatagtctatcattactagtttttcctattcttaactcccaatagaatgagaacttccaggtaggaccaatgcaaatcagaagtgacagcttatcacaattatctaaagaattctatcagtattattgggtgtgaccaacatggcacatgtatacatatgtaaccaacctgcacgttgtgcacatgtaccctagaacttaaagtataatgaaagaaagggagacagaaaggcagggtttaaacttaaaaaamaaaacaaaaacaaaaccaaaaaaacctcaatagtaagaaaacaaaccaaccacttgaaaaatgggacaaatgccctaacagacacctcaaggtggaaaggatggaaagtgtgcttaagggtacagagtttctttttggagttctcaagttagataatgttaatagtcacacagctttataaatatactaaaaaatgtttaattttacactttaaaaatgtaaatttatggtatgtgaattacacttcagtaaagccactattttaaaagatccattagacaaaaagtcatggaacctggattctaactaatcaagtgctatcatatttttataacatgacttcagacaagtttttatactttctggccttggtctcatctgtacaataaaaagccctttcatttcggaaatttatggttctatacctctagcactgtcttcatgaaaccgtcctttgctgatctaaaagtgaccactccctgctttgaactctaatcccattaactggcttatatgactgtatttgtgctgcttcttttttttttttttttttttttaggagtctcgctctgtcgcccaggctggagtgcagtggagcaatcttggctcactgcaagctccgcctcccgggttcacgccattctcctgcctcagcctctccgagtagctgggactacaggcgcccaccaccacgcctggctaattttttgtatttttagtagagacggggtttcaccgtggtctcgatctcctgacctcgtgatccgcccgcctcggcctcccaragtgctgggattacaagcgtgagccactccgcccggcctatttgtgcttcatcttatcacctttctagaaatgtgagccagttgaggaaagacatgaaactgtcttgtacatgatgtggattcagtgagtttttacatgactagatacatgaaattatttatatttagtatacactgtatggaattaagcagagaaatcaaccattttttaaaactttcattccaccaatataaatttccctaaatttgacaaagttttgatgttaatttttggcataataaaattgtaaactttgtagagtttgaaacaccatattaactcttgttatacagatgagcttctatgctattccaaaataaattgtgtattatgccatggcagcttcactgatgttgctattaaacatgatgaaaataatccaaaatgaaaagaaataaaatatttgaaccagtgttacttaattgtaaataatcaagtttttagtattctagtagttgtcctgaactacattgtttttaagcaataaaatcttccaaaaagagacctcagtaaagtacactattattaaatctgctttgagagtttaggctactgttttcttgcaattattgagtttgcaaattcttaaaaaatagaaaattatacaagccttattgccatatctataactttccatactgtgtgtttgacaaggtgaaatttttagacaaagaagaaagttgtgtataaatgtaatcaactgctttttctttttttctttaaatataaaagacaattatctgaaaataaaaaaagaaaaaaagaaaattattgggtgtggcaatagtcacactgttaatattatttgtgtaattaacaattcttgcctacagttaggtttatactgggcaaataacacaaatctggtcatgccttatacagctcataggaaaccgtgctaaaactttatagtaagaatgggcctgctgaaattaacaattataactatactcctggagcatgaaaaaatgtttaaaataaaatttctgtgttgagtggttagcactaacttttcacttaaagaaaaaaaaaacctagtactttttatttgaaaaaaaaaaagattgaagtgataagtagtgtttgagagttgaagtgactcctttttaagattttgaaatatctcaaaaatgtattcattagagtgctgattcaattacatttccaggactgaggaaatatatctaccttttcagcccacttaagcagaaaccttttctaagttattcaagctcttgcaatgggaatggaacctctttctctaaatctggtcctcttccacttctgctgccttccttatttttgctccacagagacatgcccaacacaaaaaaacaacacttgccactttctcatttcgaagagtcaagacaagtgtcttcaaacacctggaattataagtaccttctcttatccttcattctgccatttcttggaaagaggaataagaaactaaatataaagggattaaatacaaaactgatagtagggcattttattaggacatttaaggtgaagcatacattgcaagatctttttcaaagactttttaaatgttccaatgagaattggttaggtattaactgtgcaaatttattaatatatgcatctgatttcaggttctattagaaaacctgaggtaacacagtgattttccctgtataattctcatgttttcaaaaacaacatagatacctttgagctgctgtcctccaaaagctagaccctgctgcgtcattcagccaaagatataaaactgaatcaggtcacatatccaagtacacacctccaggaagaggcttccattgattcagaactctctatttaaggcaacagtttgaccttagctatatcactagttactcaaagtcaagtagttttagctgagtccatattgcataagtgctcatattaaggggaaaaagacatagagaacatcaaaatttgcacctttgttggcagtctctgtagaaaatcctggtattgaataggcatgaagacctaacaactctctgatccctggaggtggtcatactaggtcaaaaatgaagcaaattggtaggcattatgaaggagctaacacaacggggttcatgaactatctaaaaagactccactgtgactgtacaagtatacttcgtgaccactaatgtatatttgaaaagatatcaacagtatatatcaaccacatattttttcttataacttaaggttttcttgattatcagaaactaaataatctactttcaactacaacaaatggataaaggtattttttgtaagtaggatctttgcaattcaagtctagtgtggaaatggtagcttgtaaattcccttaagtcacataattcttctcatctaattttgaaaaatcacatgatagaaccattaactatatctcttagtttcccaaaacagaaagtcatagattaaagatcattaattataacccccttaatatcacaccttccctcaactaagggccaaatgcttatcatcattaaatatcccacttataatttttattctatttatagtcatgcaattatcaacaaataaatcctgaaatgaaaacattggatggattccatgtaaataatttttacaaacaaatataaatacattgaagagttctgttattaaaaagaagttattggctattattatctataaaacaaacaaaaactaacaaaatactgagaataattaaagtaagtaaattattagatcctagacttcaaagaagcctaataacataattttcaaggtaacatggatataaataaaacaaaatatttttcctcttttctaaaagtaatacttcatatagacttaatgctgtaacttgacagattgataataaacattgcttctgtaatgtcacttttataaaacagaaatcttctcaaagttcacttgagaaatcactgcctcctcatattcttcccttctcgtcatcatatagaaatttagttgccagaatctaaaattgtaacaccatcaccaggagtcacataaaaaatgcttttaatatatatcattgcaatcactcttagttcctacatgcctacatgataattaaatatttattggattctacctgttttgctaaaattgaagaaagtactaggatgtgaaattcaaagtatttaacaagtgttatgatgaagcactgtccaattagaagaaaagtgggctagaaatgactgtctcggtattgaggctgaatactagcccttctaaggaccctcctctgtccacatacattcagtagtatcaagggaagagaatgggaaaaaggctattcctccattgctatttatttagtcattaagattttagtttttaagctctgtagattttcatcttcctagttcatgatcacccactatctcccccaaaatagcacatgtatgggttccagatgccacatttatagtctatagccctatctcagccagtcattacatgtctgagtaaaggtcaaaagcctgataaaaaccagaccaagcagattctctctcaaagggatttggatatgattcaatctcttagattgacagaggactcagatatgatttaatctcttactgtttaacggagaacatgtaaatgcagacacatgggttagtcatatatggtcccatatactctgacacaatgaaatytggtttagaaagaaacagagacaaaaatgggtcacgtcagatatcagattaattttaaatattcactgtttgcttaagctagttgagtggtatgttacttatcaccaaaaaaaaaaaaccacctagatttttaaaggagacaggaaatctgtaaaagcagactcccacagtttctagatcaaattcacgaaaatatttagtattatcaaatgaaatacatgaatattttaaatacagtgctttagattcagtctcaaaacactagaagtgtgaatatactacacaagagctaataatttacgttgcataagaggtaaaaccagtactaagcagagttgtaatagggactaaatttgaaaaacatagtaataatttgacttaggtattcatatttctttaaatcttttactagtgatattttatcttgttaaaaattcgtggtaatagtcaatgtttaggcttattttaataaaaatattttgttgataaaagacttctaatattttcttcttagtcggggcttaacctaattttagtaaaaacacttaggaaacaaaaatcaataatattttcaagtatgatcktgcatcttaaatttgtaaagctagtatggcaggcaaaataatggcccttcaaagatggccacatccaaatccccagaacctgtaaatacgtgagctttcatagcaaagggaaattaagtttgctaatcaatggacctttgggtccctattttaaaatacagagataattcaattattcaggtgggctcaatgtaatcacagggtctttaaaaggggaaagaggtggcagaaaaaaaagagtcagagaaaaagatgagatggcaacacagtgttagagagatgttttgttgccaactttgaagatggaagagggagaccatgaactacaaaaagcaggcaaggagttagaaaaggcaagaaaacaaattctcccctagagcctccagaaaggaactcaaccttactgacactttaatttagcccactgagacctttgttggacctctgaactacagaactataacataataaacatttgttgttttaagtcactaagtctgtagtaatttattacagcagcaatggaaaactaatataggccagttttctcaaattgttttctgtaacttgcttgttaaaaatgcagactctttggcccttcctcagacctctaaggatcaagaatctatattacaacaaatcatgaggattattgctatgaaatttaagaaacattatttgaaaagttcttaaaaaatagtaagttggtgtcacaaatcaggaacaaagatgcagagtttcactattcaagttttctttgtttaacatagttatagttgatgatattaccatgacaatataaataaagtatgttagtcaagtttaaaactacttttaaaagtgtgtgaatgttttaatttttatagaaataaactccatatttgttaagaatgaaataataaaacatttacaacatgaaaatactgaagttcttcagttttccccctcaactgagttagagcatcaaaatcagaaagtactttttctcaaagccgacaaagttgtattttatttgatatccattgacagaaattgaatgtcattaataaaaatgaaaacaatactatccccaaaggagaagaattacattagaatgcaagttttaaaagtgaaaacaaaaagcaactaatcacatttaccaacgtaatgataatttaataagaatacagcttacaaacttgagcaaacataggaagctcactaggaatacaaaataaaagaaaattattccaagtataaccagctatcatactaagtgaaaggcaatatcagataaaattagcttattagtttattaactctttgagggaaatttaagctttcaacatagatgtgcgttggcaaatccaagttgttgccacctggctctaacttctgtcatacagtatcaatgattccatctatctgctcagaattaatttcatttaaaatatgctgagcttaaaaaaaaaacaaagtttgagcttttcctggttacacttggttaggcaaagttctaggaccctgttacaccaacttcctacccctggcccatgatgccccctcctcacctagggtgttgttctcagctctcgtggttagaaaccaatttgatcagctaatctgagataaaattttaactcagcatgagtttaggagagattcctccaggcatatttaccttttttaaagaggccattaaaaatggaaaaatcttaaagatatgaaggagtctatctctactgtatcaaacaggacaggttgtggggaaaataatctcagttttgaggcttcccaggtctcttacgaatcttgccttagagcttgtcacctattatccctggtgtgaagcttcttccagctaacagaatttttaaaagataaatgagaaacagcataaaatggaggagagaatacaaactccagagttgggaaatttagttttgattgttggtcaaatctcatagcttctcttggcctcagctggcttatttgtaaaacaagatctttaacacccctccagtgttgtgacactatcactagggtggattgaaatatatcttcttagttagtaaaaaaaaaaaaaaaaatctctacttcaagaaaacacccaaacaccccaaacattggctatagggctccacatattttatcttttaaatatttttcttcttgggtcacctattttcctgaggtaagataaagtcctatataatgttatgattagaatatccagttaactctcaccgaaatagtaaaaaattctttactgatggacaatagtagagtaggaaaaatatatatcaatctagtggatagacaggataaacttagaataaatgccaatttcaagaattcatcacttttctatttacctatagtatatggacaggtactaacttaaaattcaagaaagaagcaggttgaactaattacctgactgaattaaataatatataatacttataaagatgtcaaggaagaaaataatagttgaattctcacaaatgcaagtgttcttgttatttttaaactcttgacaggggaaagggtaatcagagttgacagctattggcaaggcactgcattccactcagtaaacctgtttctgaaaatgcaatgacaactttatttgaatcagaaccacttatctcttttgaactacaggcaaaatttaaaatggtccttctcatttgtttttctcagtcaagtatgtcaaagtttccttggattctaatattctgggatagcatttcccaaactgcgttccagggaacactagttttaggaatgctagttttccaagatgttaatggtagaaccttaagaaggcttctatgggaaattaaactttggaaacactaggatagagaaaggagatgggtttatttactgcaatgtttctcacagcctttcatatgctcatatgaactgtacactgccaacagatgggtacagtgtgcaggtgtcgaaatgtctttaagaacagaatatctttttggcctaaaacctgttaacatatcatagatggtatgggcaacatggctctatgatttagttaagaaccattacattcatttaaaaatattaattaaaattgcatttgttactgtctcagcttaaggtcttgaatctcccccaaatagtctactaaaataaaaatacccttgagggatggctcattatcccgttatcaatttttaacagcttagttctagatcagtgaaagagagaatgttagaaaaacaaatggagaaaggaaaaaggtaactaaatagtatgggaagctgactatggagaacaaagtagagccttaattctcagtatttagaagattaaggaggtaagatttagggttatatgataaagcagcctaaactaactgctctaacaaagtgcactaaaaatgcacaatagctcaaatccaatcaaagttcacttatagctcaaataacagtccaaagtgcttcagtttggtagcagccataggggcaaggcagctttactctattatgcaggagctgggttgtcaatggctcttccatcatcaacacacagcttccaaggttagcctaggagttgcctccatcccagtcagtaggaaagaaacagatagtagaggttcaagcatgggaaatatcttggaaacagatctataattggtgcatatgacttctagtcacatttctttggctagaatattgtgatgtggccacagtaactgcaagagaagctgtgaaatgtggtctagttgatgcacaggaagaaaaggaaagcaccgactctagtaaatggatagcaacctttgctacatgtgtacagggaaaaagaggtaaaaatgaggtcatagcagtatgtcacaaagcacagtaaggcagcaaaaaaaacctggtctatatacatgcccagattctatttgcgtgtgccattaaaaaataaaaggaactatttttgaaaagattaaaaataatccaaacattacaaataagggaggagttaagtgaattattgtattcctaaaaaggaatagtatgtattcaaaaaacatgatgttgtagaataatatctgataatttggaaggattatcatattatatttaagacacataaatatagtatgttcaatataatctcatttttataaaaactataaaaatgatcctctgggagaaaaagtctggaaagatagacattaatatgttcttttgccaggtgcggtggctcatgtctgtaatgccagcactttgggggaccgaggcggcagatcacctgaggctgggagtttgacaccagcctgaccaacatggagaaacctcatctctgctaaaaatacaaaattagccgggtgtcgtggcacatgcctgtaatcccagctactagagaggttgagacaggagaatcgcttgaaactgggtggcagagattgcggtgagccaagatcgtgccattgcactccagcctgggcaacaagagtgaaactgtctcaaaaaaaaagatgttatttctggccagctgtggtgactcatgcctataatctcaacattttaggagaccgaagtgggaggatcccttaagcccagaagtatgagaccagcctgggcaacatgacaagatcccacttctacaaaaaaattttttaaaaatgaaaattagctgggtgcagtggcatacactggtggtcccagcaactcgggaggctgaggtgggaggatcaggtgagcctaggaggtcaaggatgtagtgagcactccagcctgggcaacagaagaagactctgtctcccaaaaaaaaaaaaaaaaaaaagttattctggtggctatatttgagtattggtagtataggttaattttctatttttatgggcaattctcgtttttgaaaataaatatttattgtacttataataaaatatttctaaataaaaatattaatatataactaaatatacaccaatgacaaaattttaaagctgttttacaataaaagataaaaacaaaattaaaaatatgtactttatctctttccctcacatatctgatgggcaaatgttttttaaaacattagaaaaaaccttttaaaagaaatgttggcagggaaaaagttaataacacctacttttattggaatatattttttatttaataatttcaataaagaaaaaaattctgagtatttactattaagctatgtaaacaaaaaccgatgctattttgtcccaccaattctctgttgattgatgcatcaggaattactttccatcaagagatttgctcaataaaagcccatacattattttctgtgtatggatcagaataaaagcacaaagcagcaacagcaaataaggatgtataaatcaatgattcaaataaatatatatgactacatagccacacaaataaggaatttaattatatacatactgtgacaatatccttaatgctttgtaactataaataaatttataatttcctcccaatagcatgaaaacattaagtatcatttaaataactatctttgtgaatttaagaaaatcttaaaatgcatggctgttgccttcacaaataatcctagccaaagattcaaacttaaatattctaatagatttataggaaatctaaatgggccacattttagatcacagaaggacacatttttataccaacatttatcacccctgctgtactcagagatagcaccattcttctaaatgtttaatcttaattattttagttataccctaaccagattataagtaccaagaggatagagcccttgccatacttctttttcatgaggaagctgaaattgtagaaatatcataggcactggggtcagactgactggttttgatttttgcctcagaaactctccttttctttgtcactttccaaatccaacccttcattatctggtagctgggttgctgtgtaagcctcctaaccaggctccctaatgccagtgccaatctactttaagttaacttacaccaggattggcttttaaaacacaaacctgggaacaccatttcttacttaaaaatctatcttggttttccaattgtgtgatacagaaagttagacccattagacctaactgtactgtcctgggctataaaccctcaacaatggcaaaatctgaagtgttgctggccaagaataaacctcatattcatattggcaccttttattaatagcacattttaatgccctttctttgtcctctcttggaaagaaaacttttctaattttcatgcaataatatgaaaatgtgtgtttcataattaaaagtaaatttcatgagttacactggattagcacaaatcctatgagctgtttacatagtactggtatttcaaaccacatcatttaggatgatcaatgcaaagtctacagaagattaataaatgataatgctctgaacatacaagaaaatattatagccttgacaaagcatctctgaggtcaaaaatggcccatgtcacttcgtttcttgaggctcccaccatgttaaaaaatgaagaaggtcaaaacaggactacatatagcgtggcttactctaaatgtttatatttaaccgattaacatgttcaacattgaaaaaatgcaatgcaatataattccaccattcataaaataattagaatttattatcatcataatgaatattttacaatttactaacggtggtgtggtctagtaataggagcaaaacgccatcatttttttaatctggtcagtgtgtctttgtcactccatggtaacattaaaaaccctcatttcaggccttttctaaatgggaaacctagttccatagggccatgctggccctccttctgaagggtatagcaattgtctccagacccagaccaactaactaatctactttttgaaagacacactactagtagactctgctaattgcttaggaaatatacagctctcacaaccataatagtagtaaccccacagtggttactattactactactactacaatgacttcctattatctatgaatcaaaatacttaaaaacaccttcttctggcacacatggtttccacaataaccgtccacccctgacaatattactcttcaggcttaccttctgcacctggttgacctactcgactccaaatttagatcatgctctcctctttgctttcacttaggatgtttcctctgcctggaaaaggctactcaattttgccaatcatatcatatccattggccaagacttttcttaagcatcctctctttaaaaagaaactgcttgtacctgacagttgtatttttatttaaaccttgaccgtatttcatgtttttcattgcatcaattataatacatgctacaattatatgtacatttctttacttctctgagagattataagtccgttgaaggtataaaaaatcttgtagtgctctacattttctgtgccccccagcgtaatgcattatatataacaaacatttaataaatatttattaattagaaattgcaatagctacagattttggcaacatgcttactaaagtaaatatttcctatggtttcagtaacttaaataccaaactacttatttaacattaaataacatgctaaataactagatttgcataacataactagatttgataccaatttcaagcatactaggcataaagtatgtagttcataaatattaacaaagaaataggtataataataatgcatcaataatgctatcggtccttaaaaataagataaatcataatcacaatctaattttgttttctgaacagaatttaagccatatttgaaattcaaataaagatgtattactttcttaaaaaataccttaactgagttcctaaatgtcttggcaaaatatttatataaatataagatatttatattatgatataagtcataatatacaaaacattcattaggaagcttaatcagatcactcaagcatttgttgatatggaaagttcatccaaatgtatcaaaactcttagccaatatcaatacaactataattaagaatatattcagaaataatgctataattaatgcttattcaaattgccagcttcatggcaaataaattcatcttgtccttgtaggccacttgtattcagtccccagagataaaataacttggcttgactccaagtacaaatcacttagtggggaaaaagatcatttttttagtgagaattcattgcatcaaaagaggtacataatgtaaaagataataacctacttaaacttcctgaactctcaacctaatcttgttatatgaaaacaaaatgtatattgcacttattttaaaatcacaggagactaaaacaactaattgagaaagaggtagtactacatcaattttttttttaaaacaggccaggtttccctaaggctttcctgcctttcaacctatgccagttcctcacagcccacaagaacagacagacatatgctgtttgaatgattgaaatgaaaaggaagaagtaacatcaccacacctgcctctccttcttccttgctgccctcttagtacataagttaactgtacaatcatggttcctatgtctctgctctaaacaggtctcacagaagttacattgattgtccaatgaacagatcaattgggcttctttccttgtagttgttttttctagaaaggttaccctgatggctgctcctttccttgaaattcttatcaacaccaatgaggatttcttctatgtagttgcttttctagctcttcttgctatccctcaataaacagaagtcctccccaaagccaatccttctctctctttgctatgacattctcatgcctttacctattagatttcatgaaaaaaaaaaacagacctcaaacctctattatttaaagttctaaaaccctccttatgtgccctccgacagtctgactttctgtcaatgtccaactggatattgcattgatatctcaaagtcgaatggtcaaaaaccaaataattcacctctctccctgctcccctactgccaaaacccccaaacaaccaaacaagacaggccacaaaacaaaatcagcccctcctgacttccccatcgctcttgatgaacacactctcctagggaaacatgctagacactgcagagtgaggttcacttcttccaggtcccctctgcccatctgaaggagtctgcctctccagtgtctctcatgcctgtcttgtctctgccctttgttctctccacacttccatgttagaacgtatcttctcttacttggaaaaaaaaaaggctctatttgtccctctctgtgccatctctaatgccagcatcaagttaatgtgttgggaaatagctttgatcattcattgattccttaagtattcattactctctctcttttttttttctttttttgctagagaaaccacacacttggctttctattgacaaaccccggttgatctctgcttaggcccaaacctgcttcctttgctttctcttgatttcacacaagccataagaacttggcctactctgaactgttcctggggttcttttctcaccttcaagcctagatacaaaatcagatgttgttcctgagtgtctgctctcgtgttctttttagcaatataaaaaaattagcccccagctaacaactacatattttagcttcccttactgcgaagtatgaccatatgattatattttggccaatgggctataagcagaacccacacgtagcacttctagagcatgcctttaaaagaagtatgccctccgcttctttctcactttctctctttgaccatactgatgccagaaacatccaatgggatggggagcaccaaaaaggaaactggtttctggacaaccttttggaacagcacattctcctccatgtcccctcctacaaccacttatagcttagctgtctgtgtgtgagagaaatacatttttaccttgtctaagcctttgttattttggcttgtgttaaagtaaccaatgcaaccatctaaataatagagaggcacaatctcttcagcacctctcttactggctgacagtgataaggtgtgactcacaggatattgtacagcaagaaggagttaagctttaacacttctgagcttctaatgatagaagaaaggttcaattgatattacacagaaaggaacatggtggcaagaaataaagaaacatattttgagttctggacctagtaagaaaataaatcttcccagaaaaggcccacagctatatagtacattcaaggcacattgaaaattagagagctgctgcaatctccatttctgttagacagaaaaagagacatctgaagagcaccatagaagtacaactaacatgaatattagtcatttgttcataccaagaccgagaactcagacataaggatcaggaaaaacagaagctataatcccaatgcagactggcatgaagtaagaaccttacgggctccgttaaagtgaagaaatagaattggaagaacataagaagggaaacttacaatggatcagaccacgtgctagaacttaggctaaaagttataatgatttctgtagtaaggagaaaacttgagttaatacctgtgccccactaaagcatatttatagttatttattgatcatatttgtgtttatatttaagagtagttgtaagaaaactgttttcctcagatgctaatcrgcaagaggctatcgaagtgatgagagacacagtagaattgttctgtttcttccaggagataagaagtacattatttttatggagtttggttcaatgacaggagatttaatgagaaggaggcttcaacatccataaacagttgttaaaatgtttggtacacagactttgtatttcagttctttctggtacaagcttgtgagaatcaggtggtttccaagatctggcaggaccttacaaacacaggcagcatcataagtagccatgaaacccattaggaaccctggaccagggaaaatcaggctaaggtatgctacatctctcccccagtttctgctagtctctgtatccttggccaaaagaatcacaagttgcatgtgtatagtttctatctatctgtaatccacctgggacactagaatagtaaagaaatataattctacaggttaggacattatcaacaaatccttttatggcattcataataccctgacataagaaataacaccatgtaatacacataagatgcgtggggaaataccaataaatgcatgagacttagtgccaaacagacctgggttaaatcccagctttaccactttacctttgggcaacctataaaacatctctctaagcttcagtttattctactacaaaattaagatcaaatgacaacatagacaagtatgcaattgcacctataagtgctatgacaagtcaaaataccattggagtgtgttacagggcatctgacctagttcggaaaatcagggaagtcctctctgaagaaatgatattatagctaagatatgaagagtaagaaggcttaaacagcaaagagtgctgtaggcaaatgggaaagtggcctgtggagggaaaaactacaacacatttcaggagatgaaagaaggcaactgtggcgggagcagagagaacgagaggggggttggcataaaaggaagctgtaggtatatgcttatgtcagacaatacagaacagcacaagccatcattccaatgaagaagctgtaggatgacaagcagcaaggcttaagaaatgttagcttgctttattgtcactgttaagaaataacatctgggctgggtagaccctgccttgtgatcactgactcagggaccatatgaaagagaaccagattagcaatccctcctgatagaataggatatttaaaatcctctttttttttctgagtgagctacaaaaatatataggcccttttcttattttttttcaacttttttattttaagactgtaaattcacatgcaatcgtaagaaatgatacagagattctgtataaccttcactcagtttcccccaatggtgacatcttgcctagctgtagtacaacatcacacccagaatactgacattgataagatccaccgaacttattcagattacaacaggtttacatgcagttagttgtgagtgtgtgtgtgtatgtatgcgttggtgtgcatgctgagttccatgcaattttattacaagtgtagattcatgtaccaccaatgtgcaattttattacacatgtagattcatgtgccatcatagtcaatcacaaagggcattcatgctaccctttaatagccacacccacctccttccctctcccccacctctattaaccttggcaagcactaatctgttctctatctctataatgttgtcatttcaagaatgtgatatcatatggaatgtacttaaaaaaaatttactcagcaggatccctttaagagccatccagtttgttgcatatatcaatagttcattcctttttattgctgaattgtatttcatgttatggatgtatcagaatttgtttaaccactcacctgttgaaggatatttgggttgtttccagttttaggctattacacataaagatgctgtagacatcaatattcagatgtttgtatcaatgtaagtttccatttctcggggataaatgtccaagtgacaattgctgggttatatggtcaaattgttttccagagcagcagtaccatttacatccccacaagcaatgcaggaataatccagtcgctaaatcctcgcaagcatttggtgttgtcactattatttattttagtaattctaatagctgtgtagtgatatctcattgtttttaatttgcatttccttaatgactaatgatgtttaacatcttttcatgtgcttatttgccatctgcatatacttttcagtgattttttttctgttcgtgtcttttgcccattttctaactgtttgcttctttactgctgagttttgagagttcttcatatattctagacacaaattcttcctcagatatgcggtttgcaaatactttctcccagtctgcagcttgtcttattagtgattataaataatgatcagtatgaagaattcaggaaataaaaaatatatacatgtggaagattcagaacttgccaagttcttctaataccggatggtgtgaataaaactagtttctgagatgctatagaaatagaacatggaagcttcattgtactcaaacctttgctttcccctcccatatctgcatacggtttatgtggactctttccttccataatgtatcattattcttaatagagaatcaatacagttgactatatatctcatacccaaactatcctttctcagaatatcaggatatctggctggatggttcccagatcaccaggcttttgccctcttccagtatgacctgaaagggttctttccttctacttctcaaacccagttgttccgaatgcctacaaaaagcatgaattttacaacctaggaatttagggttatgacagggtaatccaatggcctttcaattcttactttctttgttctaaaatttctatcatagtcattatrccctacaatatgcctccagaaaggcttgtgaggaccatacttgttctcctaggttggggttgttactagaatgaagagaagatagagttttctagcacaaggcagatgattctcttgctatgaaattgaatgcctctctcattctagcaactatcaattaatcactgcaaattagtaaacattttatctaagtaaatcaaagtttgctaagttggcaatatgtacgctgctcttttgaattttgtatggttaaattgtttcttaggaaaattttctggattcaaacatggcatccctcacatccccttagagggaatgactggaaagttggactcaactgggattgtcaactagagtgccaaatggggccaattcaaggaaggaatgttccaagtgataggaaataaatgatgacagtttcttaaagcctgggctagaaaacgggcacagtgtaattccactgtacacaactggtgaaagcagttgtacagccccctcagattcaaggggagaggatataggatcacagctctcaatgggaggaatgttaacaaacttacagcaatcttcattccaccatacaatttagtggtggattaggagagaaatattctgagttcttccatatctgaaaacgtcttcagtctgtcattttttggaggtgcatataccataatggaggcccagataccattttaagttggaaaatagatttttctctcataacctcaaaaacaatgctccatcttttggtgtcctgtgctgcccccatgtaaatcagatctgtgatcctttgttaaggcatttttttcttctcttgaagcttttataatctcatctttatccttggtgttctaaaaattaaatatgtatctgagtttagattattgtttgggaaccataaaatgacaaatatccttcttcaggtctggaaatggtctgctactattttcttgttaatttgttttcttttttttttttctcattttccatggttttttttttgagattctggattgtacctcttttattggcatctatgctttatagcttttctcccccatatttttttctgtttgtcttcttgctctattttctgcaagattttctcaatgttgttttctagtgttattgatttaatttcaacaatcatatttgtattctctagtagtactctctagctcactaatggttcctttatcatagttttcctaattcttgttttatggatacaatatgttctcaaacacttctaaatattttcgatgaataaaaaaaaaaaaaaaaccaagatacgtatgttctctgaatagttactctttctgctgggatcaggtttcttctttgtttatttgatcttttaactttcttgttactgggtctccccataggcctggcaatcactggtggtccattcatagttacaaaaggagggtggggttgctgttgtgggcttcctctgctgctgagaaagaaggacttattcctcaccgagtcttttccttgagtgggaattttgactggggtatttgtgtggagtactaaagcatggtggagggaatcaaaggtaaaggatgaaactttacaagttaagatgagagagtgagaaactccctcaattggcagagtaagaagagctctactcccttttctctggaatatcaatatccacactaaaagcctgagttttcccaagtggatccattctgattttgtatggaagagccattttgttgttgtggttgttgctgtttgttgtggttgttttcctaggcacctgccagataattctattctgggaacagaaattggggagaggaatggaggcaatttcaattaatccctgtttacatccacatttcttactcatacctctatggaccttgctgactatcagcccagaatttctctcctctgttaaggatttatccatttaaaatatctcataagggatggaaggtaagcacatattccaagtatactatctctaaataaaagttcttgataatcttctatatttaccctcaacttagacatgataacaccccttgctttcagagctacaaatgtcaaaggatcatcagaagataatgtgatgtaatagaaatgacaataaggtgataatatatttgggtgatggggggacttcattttgaaaataccttttctcatatagcatttataacttatttttcattttgcacattaaaaacaacagatggatggatggggcgcagtggctcacgcctgtaatcccagtgctttgggagaccaaggcaggcagatcatttgaggtcaagagttcgagaccagcctggccaacatggtgaaaagtcatctctattaaaactacaaaaagtattctggcgtggtggtggatgcctgtaatcccagctacacaggaggctaaggaagaagaatcacttgaacctgggaggtggagtttgyagtgagctgagatagtgccactgcactccagcctgggcaacagagccagactcctctgtcttaaaaaaaaaaaaaaacagatggatgattccctatggtaggccgaaaatatggaaattccaccaatattttgacattcttgtttgttttgcaaatgtaccagaatgataataaaagagctagaaaagccaaagttagcagcaagagcactgaaccaaaactgcatatagatgatctatgcaaacaatgatactgattggccatttcatccacttgtgtcaagttgttggtaatgtgtagacacagcattatcaatgcaacacaggtaaacctctgcatgtagaatcctagtgtaaggactctaatgtcacacaggatttgagaaaacatcatttttaaatctcctatacaggtgctaaaacacctgtctgttgttattgtacttttaaaacattgttttactcataaaataatgtaatctttaattattacaaacatctttctttaagacaatcttctatgagggtcccaatataaataaaatccattcaagcataacttcaacttacatgttttaatatcttatattattgtattcaatcatgtatgaaagtgtgacaaaaacaaaattattaaataaatataatatgttcacacataacgtttgaacagattagttttaaagatatttttaaaactttgagagggcaagttaaaatcagctgtttttatatcaaaagagatctggtttcatttcaactaagtatttgaatgatgaatattatgaaatttggaaaacagttaattacaccttacatgaatcaattaaagcaatatttactagaatctcactattaatctgtcaaaatccttcactgctaaaacatgattaatatgatatttaaatgtcaggcaaagttcaaacacaaagttaattgtgagcattagtggtacactaaggtcaaactataatttgcaatttgtaatgagctgggactcttatcaaaatatttcatctgatatcattctcaaaagcagtcatcaagaaaaatagacatacaatccactgcaatgtttgtgagatggaagaaacaattagagacagagaactccctacagctaggtagttaaaggctgcaaaattgatcacattcraattcctccaacatgcaaataccatctaggcatgtggtcaagaaattacaaggaaactgagcaaactaaaattaaacttcggcacccactgagacacaacacatcaataatactataataactatagcctttttcctcatttgacaagattaactgaacttcctgatactatgagagtcaagtgcagggagtacaaatgaagagactctctgaggtaccagcagaattctgaaaataagtttaataaaatcagtacagagtagaagacacaaggtataggtaaaaattaccctaaggtaatagaaagcctctccagcccagagggataagtaagcctgcctattacccagtcaaaggtgtaaagatcccaggagaacgaatgtgttaactgatgaggatgatcagaaaaaagagcgaagaaaacaatcagactgaccaagtttcccagagttttatccaacaaattcctcaaataaagagatgaggaatttgggagagtttggctacctttcacctttcactaaagatctgtctgttttaaggcagaggttcttcagaattctctagagcttagatgagtgcttcaaatcttaagctttgagttcttgaaggcctgtcagaggctataatgagaaggggagttatgggatgggatatgaagagactagagtagttttgctttcatttgttatatacttaatcaagggtaatttttaaaatggaaaatttaccaacttatttgaaatgtttccaccaccctgatcacaggttctccacacatgtgccagatactaagtcagtttccactgcatcctgactctggaaatcatcctgatgaacwgtcttaagcatttaagtcactcgaaagcaagatttcttttggaattaccacacttgtagtctgttttgttttaattggctcttgtgagtctggtggggatgagccagtgtccatgagactgaaaaccttggggaatgtgggtaaaaccaaattctcaaactgtacatcctgggaccatggtaatgctgccatgcaggtaatgcttccttatatgttctctgaggatccagaacatcctctagttgacatagatattgtcactagaaccctcaagccatgaataccatttgagaggatttttctgctagcattattgttattattgttactgttcttagtttatgttagcatttagttcattgttcacttaatcaaaataacttggttgtgttctggctctaaaactgttattactaataatttgcttgccctgacttttcttaactgttaagtggagataatatttaccgatattctctcaattttagagatttttgccatacaatggtcaaataatgtatttcttatcacatagtatataaattataaagctatctgtttatgaattatttacatatttatttatataatcaaaatatcatcaaaatatccctgctgcataaagccaggagtcatacaaaaaccttctgattatctaaactacaaagtactacacgaataaaaattgtaattgccattaaaattttagtgttcttaatattataaatttcagatagatttttttttttgagatagggtctcactctgttgcccaggctggagtgcagtggtgtgatcacagcttcctgcagcctcgatctcctgggctcacacaaccttcccaccttagcctcctgggtggctgggactacagttgggtgtcatcacacccatctaatttttaaatgttttgtagaaatggggtcttactatgctgcccaggctgctctagaactcctgggctcaagtaatcctcctaccttggcctcccaaagtgctggaattacagacatgagacactctacctggctgatttaacgtcattaattccaaatccagtgttctttctccaccccattgaatgtatatctaattttatcataggatatttcacttaaaacaaatttttttaaaaagtagttatttaacagacagatataccactttgtatattctcacctagtacctattgataagttttataaagaaagcaatgaatcattgccaaagatcatggattctctgaatgaaaggtcaagaaacagagagaatgatgcatcccaatatagctcagtggagactagaggcacactgtctagatttgaatgcttggtttcaccatgtattatcttagtgatcttatacaggtcacataagcttctataaaagagaaaataatatcctaacttcatagggttgccatgagaattatttaattctcttttggagtgcaatggcataatcatagctcactgcagccttgaactcctgggctcaagtgatcctcccccgctcagcctcctgatgtaccatcacgcctggctaatttttatttttatatttttgtagaaatagggtttttctgtgtttcccaggctggtctgaaactcctggactcaaatgatccttctgtcttggcctcgcaaagtgctgtgattaaaggcatgaaacaacacacctagcctgtttaattctcataaagcacttaggtcattgactatcactgagtaataactgsataaatgtcagtcaatgattgctatggtccaaagtttccactctcacctcattgcaaaatagatcttctgatgagaaactcaacattatccctagaattaaagcaatatcatggcccaaaaaatttgaccacagctgaataaaatagcgtcttcagtcacccaacccccttcaaggaaggcaaagctgtccagtttctatatgaggcatgtgcttctggttgtgtactcagtggctgaccctaactgggcatgatttttctgttactgtatgctatgtggacggtttatttatttaacttttagaaataaatccactaataaaataacagcatttgggaataaaaataaaaggtagattttgaaatctcagggtagatgtacaaagaaaaacaaaactactctcacttatcacatcaaagctattaaataaatgtagctaaatctaattcaatctgtcccaggttgctataagatccaatatatgttacagctactaagttatgaactactcaggagcccacccaaaaggcagtcacttttatcctcagaaggattggagtatgtgaatttactgctccagattcaaagagcttgtgcctatattcctattttggaggccatcacttcagtggttcactctgttggtttccaagatggtggttcgattaagattcccccctgccttattacaggtatgcaaattgatccacccagaatggctgtctgacacacacccaggaagaattgtttcatccttatgctatctttcctataggagaaaataatagaagaaaaccatatacagtgtttgttattagcaatcatacatctcctattgttacataaagtagctctcggaaattattaaggaatttgtgttgacctatatgtaaacttaaggtccaaattaattacacagagagaacaaacacaagcataccttgcaaggatgccagtttgggaaactacttaaatctagcatatatatcactaatctgtgtaacaactagtccaacatctgttgatctcatgcaatcagaatttgcatctgcctcaattaagcagataataaatctacatagtttgtcacttactgtgttcctgtaagggtgtcacaatcataaacgaccaagattagtttctattctggggaagtctagtctcctataattgaacagttactgaaagaatctgattccttttatgaggttttgattttgatgacaattaccccttcaggagagagtaaagaatgcaagtttattctttgaaaagaggatcttctgttctaaatgggtcttcaattcagactaaatgctgaagattgctcttcataatcaatcattctttctagcttcagaatgcatggaaacagaattagcggctggaacactggtgaacaaaggaatatgaggcaaagagcagaaactaatttcagaaaggccaggttttttttttaagccatgggccccttggtcaagagtaactagctaccctagtccctccacacagacctaacctcctgccagttctcaaggggctcatctgagtctgagcctagaaggcattttcacattttagsgtaaattatgcttacatctcccatgcggtttaggaaagacttaattgtcactgtcatcttataaatatatatcagtgatgatacatagatatgatcttaaatgccaaagccaatccaaagatagtgactgactgactcagaaaagattctgaagacaactcttgactcaatgtgaaaaagtgtaaggtgattgatgtgcactaactggcaaggatataggagagggaaaaggatgacatttatatcatattatttggcctctgtattttataatgcataattgggctttattttcatagacgcatagacttttaacactaaaagtgattccaggaaacaactagtttaatcccttgaagcaaaagcattttcccataatagctatttattttaacattcattcactcatgaggcatctattaagctcaaatcttttgatagacactatactaggaaaaccatatttccctgctttcctatttctttcaagagcaacaattttatctaatgtcccaaattccatagtccttgctaacatcaagctgctgttgccagttgcttctaggatctcagtatctgattgtttcagctgcctccttctctgaaccactgctaacaggctctcaccttttgcgtctacttttctctctctttctaaaattccattataatcatgtaagcacttgaagrtcccccttcttttacctagccaagcaaaccactctaagaattccctttccatcactgacttcatcagtttctttccctctgctgaatcattcacatatattcatatatctgctggatatatcagcacacaaatatgctcgcttgagagcatttctatcatatttctgacttccccactttccctcctcccattttctcttgaacctacttgtattagtcagttttcactctgctataaagaatttccctgagactgagtaatttatcaaggaaaggggtttaattgaatcacagttctacatggctggggaggcctcaggaagcttacaatcatggcagaaagggaagcacgcaccttcttcacatggtggcaggagagagaagagcgaaggagaaacttccaaacacttataaaaccattagaacttgtaagaattcactcattatcatgagaacagcatgggggaaatcaccctcattatccaaacaccttccttcctggacatgtcaggattacaattcaagatgaaatttgggtggggacacagacctaaactattccactttggtttttgctcctaccattccatcagaattgctagggtcagcaccatttgacacagctgatcactctctccttgatatgtgcatgtcactggactttggaaatacaaaaactttcttaattctcttgcctcatcagctgtaccttctcagtctcctttactgatttttctgcctctctcgaacatctaaatgttcaaattccccagggctcagacctcacactttttttcatgtacactcactccctagtaaatctcttccattctcatgtgtttgaataccactgacgtgtacgtatgtacacatatagacatgtatgtacacatatagacatgcatgtatgtctgtgcatacatacttatatatatgcatgtgtgtgtgtgtgtatgtgtgggtgtattcaatccaaacttctctaaatttcaaactgacatcctactgcctacctgttatctccacttggctgtgtcataagcatctaaaacaacatcccaaaccaaaagcctgattccccgactttctaccatttctcgtcttctaactcttcccaaatgcaattaatagtatctccatccttccgggttaaaaacattattgattcctctctttgtctcttacccacatctaatttatcaagtcttgttagttcttccttcaaaatatatctagaatccaactacttctcaccatttccaccactactggtctgagctataaccatgtatcttctactactacaatagcctccaaatgctttttcctattttatctcttgcccctccccattctctattttcaacatgatgccaatgtgagccctctgccatgtcaaattgttatattcctttgctcacatccaccaagggatgtaagaccctacatactatgactcccccaatacttctatgaggtaaagtcctaccatcaacctcaactgctctactcttgatcacactgactgccttgctattctttgagcataccaagaatgctactggctcagggactctgtactaagattgctctgcctaagattgctcttcccccagatatcttcatggttccctccctcattaccttcaagtctctggtcaaatgttgtattagaaaaatcttccctgacaattatataaaagaaactgttcctaggctcctagccacctcctatccctcttaaccttatctttctccatgatacttatatatatggccacacacgtgcacacacacacacacaatgttgctgctattgtttattcttctggctcctctcttacctgccccctattaaaaaaaaaaatctgtaattttcatgctgacaggaaccttagtcaaatggattcactgctgtatcctcagtgcctagaatactatgtggcacatagtcgacactcaaaactatttgttgtatgagtagtgagggggaagtaattgtgtgagaaggttcagcaaagttacaatggaaagatacaatatgggctagtcttgagttataaagaatgaattaggtatttccagaaattgaataggaaattctaaacaaaagcaggaatatgaatggattctgtgccactttgagtcatctcagtgtcagttattcatgaagacatcccctgactaacttacattgattgttttcaaatttaaattttgtgtcctatatggtccacaggtcacagtcagtatttgcttcatatcattttacaattttgggggctgttctattaatacaatcagtatgtatttattgtttttctactatgtgctgccataacgatatgctggtattatcttctctctaaaagcgatttaaaaacttggttttctggccttatcagattgttctagaaaagattttgcccacatctaacttcactgttgcaaaccatttcttcagttaagccaaaatgttcctattatttggtaaaagctataattgcaatgatttcactcaacactatattagtaagccaaattaattgtggattcagttcagaacatatatgcatttttttctgagtgtattttttattttagctttgatcttaacaatttctctaagaccataaattctgtgagggcagaaattgtattgctcaggtcacctatcatagcccctcatacataacaggcacataaaaaaatgccaataatgatgacccatggcatgaagcacaggtatacaagaacaccttgcagttgaaatattcccattttaagttgttaatatgagaaaattttaaattttgacatactgaaaatgtatatgttatatatggctttaatcatttattttttgtttttgttttcagtctgtcttcaacaaaatggataaaaaaaggaagttaatctttggcaacaccataagcacagtctaaaggctcacaaagccactcccacttattttcatattctactttggaaaatggattttgggttctctgagtagaagctgaaaaataaatgctgtggttttgagaacagaacaaaagcactgaagagaaattcaacaaaggctctgaaccttgtttgtgttctgtaacactgcttcaaggcaacatttttatttttaaatgtatgccctcatttacacaggaaattaagaaacaaactctccgtgtcagtgtccctgctactaaacaacctagccatcagctgatttacaattgagtcctaattgaacagttatggtttcaactatatcagcatatctgcaagttccttagataaatattccaagcatttcccatagattttacaggcaaagtaaaaagtaaagagaaacctagagcaggtaacattttgtagactacttggcatatcattctgcttcctttcttagttatatctcatttctaatacatattttcaaagacttgctatttaaaatataaatgctttcattaacaaatgttaagaaaccaaataagaggttttagagaagtcacagagtcttacatctttagtaatgtaactcaaaatttggtttaacaattattttcatggagatagatcttaacatcatgtttaatcattttaatggttttcgtcattcacagattagtatattcatttggatgccttcagactagataaagacaggtaatcaagcagtacatcctaacaggtataagcaggcaaacatggatagtttccattaaaactatggagattttataatttgactcattagcatgcttttctcaaaaagcctcttactactgatcacagtttacraaattgttgcgctacagggaatgtatagatccaggccaaacaactattttgcacagaaagaaactggggtttgtggacatttgatgagattctgaaggtcaaagaacaagctaggtcctccatccaggtactttggaagaaatcagataactgaagctcatgctagtgtgaaaggtaagctcagtgagcataaaggaagcacagagttacaatcataggtcatgttttggccggagaaaggacattcatggtctcaagactacaaacgtggcaaagtttcaactgaagacaagtttgaggtatagcctcaaagtttactgcttaatgaggccatcagagctggacaaaaaaaaaaaggtcaagatacagacccaggtgttgaaagtgtccccagcatgcgatgagtcaggtccattatcactgtggaaaccaagggagtactcctgagatcagtagatgagagtaatccttggcaaagggctgtagaagtgagtggcactgacgagagggtagagatgtgataacaggcaatgattatggaaagaaaaaaagtacccactaaattttaaaatatatggttctagttgccagtggaaagagagaaaatcatgtgctagattaatcatgttgaattatgaagactaaattttagacagactgccatttgctgagagcagtattcattactatctgattcagtaacgcttataactaagtggtcagactatatacctagagaaatattgctcatgtcattctaaagccacatgcacccaaactggacaggtagctgtgttattattaaagaaaaaagtacccaaaaatgcatgcacaacagatagtttccttcaggaatgcagtgcatttgaaaaacaattttctgaagaaaagagtccccttactatgtcattactctgaaatgaagtctaagggggagggaggcaataaatggagagcctgtggccttcttttctggaccaggatcatttcttatagctgagtaatcatacccttagccaatatgatgtgagagtttgcagctttgctactgggcaaggaacgaattctgaaaccatgctgcactgaagacggcaacaactgacaagagtgtcagtgagtgttttctctatatgagtgaataaacaaatgaaaacaaataaattactcatttacttgtgtgattttgataggctatgaatcaattctcaccaggaagaaaatgtgccttgggtggggaagggtatgccctaagctagaaattgctatggctctggtaggagagcgagcacaaaattcttatgacattgccatttcctgccatcctgtatttctctctgggacttcacagctgggcagcatattactggagcccacttttccagaaccatttctactcatgtgtggaaggcaagagaaggtaagtatgtccattttcatccccctgtctatattgagtaacagatatttatggagttcgagtgggaaaaaaggtacagggagagagaattctattagttgaggagctgaaatgtaatgcagatcaaaggtacagggataaaataaatttctatggctatttcaggtaaaatttgatatggctaattttcatatgcaccatttctgatgagatgtccaagcacgagttttcagagtaacaatgcaattatttccattatcattttgaatttatattgttattcttcctttaaggagtttgagtacctcatacaatgttgcaattactttcagaaatgactcactatagtgcgaacagtatttcataataatgcagccaataaaataaaaacaaatataaatttcacctaggcaaataaacatgaatgcattcagttcctctacattatactttttcaatttacaatgaaataattcacatatagtaatatttatatatgatattaacataggggcaaatgaaacatagttgataaagacacaatcctgacttttaaaaaaatttaaaccaaccttaacagaaattatgttttagaaggccaataaatatagatttagagcgactatttatacattacatatgtggtagctattctggagttttaggtaagttagggtggacacatgtttataggatcacagaacagaaatttcagagatgaatgggtccaatcactttagcttacagatttattagtaaaggctttagcccctaacttgccgatgaggaaatgaaagctgagagggttcactgtatcttattttttcagaacttgttcaagcttgttgggagttagaaaataacgaacatcctaaattattgtaagaaaatttgcaattaggaagaggaagggcttccatatagcttatgtgcactgcagctttcattcattcagcacaattgtactgcatacctgacgtattatacattgcactaggtacaagaactatagcagtgagctagattggtatgattcctaaattcatgaaccccacaatccactgagagaaacaaacaaggagagagggccttagaagacccctagataaagattatataagggaaaagtacctaaggacagatgaggctgttgtggtaaacatgtgtgagactgcaaaagaccttataagccacgataataacttcagtattagtactaagagcaattgagaaccacttaagagttttatgtaagaggtagacatgagcaaatcatattttataaatatgtttctgactgaaggaggcaagtcaaggcaggcaggctggccaatgaaaaggcttctacaacactttaaggcagaacatgaagtcttgcacaaggaaagtagcaataaggacagaaagaaacaggcttacttttcgaggtaagactgaaagaattgggtgactgcctggatgggaggtgtgagggagatgaaaacggaaggagggtgtgcaagtttctgttttagtaagtgggtgaacaggaagccattcaacataaaaaggaacacagaaggaggagaagaggaggatttgagtgcaagcaggttatgttcacaggcatcactccaaactaactcctcccacatacaaactcccatatatgccccttgcctacaagtggaaaaaatcattcattttacagtgaagtagaatgattccctgtaacttaggcaatattatagagtaaaatcttaattatgtatatcttttattcgtttagtttatctgtggtatatcttgattaaacattaagtagactgcttattttttttttcttttttaaaaaacaagtctggtttaccacctcatatagctttcatcttaccaagaaaattctttgaaagacaaacatgtaaaaagttccctcatatcaaggaggtcttgacctaggggtcaagtcaggaaaactggacatatttccagcttctcaagtcatatattcacagcaaaacttcattattttgctggcaattacttttcagaaaagtaggcatatccataatcaaatataagtacaaacaggccaggtgtggtgcctcacgcctataatcccaacactttgggaggccgagggaggcagatcacttgaggccgggagtttgagaccagtctggacaacatggcaaaaccccaaaaatacaaaaattagccaggcattgtggcgcatgcctgtaatcacagctactcagaaggctgaggcacgaaaattgcttgaacctgggaggcagaggttgcagtgagccgagattgcatcattgcactccagctttggcaggagagtgagactctgtgtcaaaagaaaaaaaaattgtgtgtgtatatatatatacacacacacatacacacacacttatgtatgtacaaattacattttaaatgcaaatataaatgactcctggattaatctttgaatcactgaactctgtttttatcataagttgactatttaaaaggcttttggaatgatttcttggatatgaaatgaaaagcacagacaacaaaagcaaaaacagacaaatggaactacatcaaactttaaaacttttgtgcatcaaaggacacagtcaacagagtgaaaggtaatctatggaatgggaaaaaaaatcatatatttgatgaggggctaatataaagaatattcaaaaacctcttatatgcaacaacaacaaaaaaccaaataagccatctaaaaattggcaaaggacttgaatagatatttctgcaaatatgacatacaaatggccaacaagcttgtgaaaatgcaaatcaaaaccacagtgagatatcatcccacacccacccattaggatcacacctatcaaacaaaagaaaacacaaaaataataagtgttgtcaaagatgtggagaattggagccctggtgccctgttggtggcactgtaaaatggtgcatcctctatggaatacagtaaggaggttcctcaaaaaattaagattaaaattaccatatgattcagcaatgccatctctgggtatatacacaaaggaatgaaaaccaaagtcttaaagagatattttcacacccatgttcacagcagcaatagtcacaatagccaagagacagaagcaacccaaatgtccatcaccagaagaatggacaaacaaatgtgatatgtacgtacaatgaaatcttattcagctttaaaaaggaaggatagcctatcatgtaataaaacatagatgaactttgaaaacgttatgctgagtgaaataagtcagtcacaagaagacaaatactgtatgattccatttaaatgaggtatctaaactagttaatatcatagatacagcaagtagaatggtggttaccagtggcaagagacaggaggaaagagggagcttttttaaaatgggcatagagttttagatttgcaaaatgaaaaagttctgcagacctgttttaaaacaacgtgaatatacttracactactaaaaagtatacttgcaaatggttaagagggtaaattttgctgtgtttttcaccacaatagaaaaaagggccacttattgtttgagtctatctacatgaaatgtccaagacaggcaaatcagtagagacagaaagtagattggcagttgcttagagctgaggaaactggcggtaaatggagagtgaatgctaataggtagagggtttctttagggggtaatgaaaatattcttgtattaaatattgcggacagtcccagaactctgtgaatatattaagaccactgaattgaatgatttaaaaaaaaaacttttcgatgctagtgattgacacacttgtgttgccttttatatagcctctctcaaacaccaaagactcttaagcaattccccacttcaaacactcttaagaaatattataaagtagttccttcagatatctcaacaactattttcttagatccaatgcattcaactccctaggaatcctcagacaacaaactaaaatgtagcactaataatgttatgctaagaacaatggcataatgccagaaaatttcaaggataaaaatatgaaattctcttgcctgagatttagtgtgcattgcaaaaaacaactatatgtatcagccagcttgagtaagatgttttgacatcttatctcaacatctaaaattaaaactacgtcttcactttgcactaaaagccttgtgtttcatctaggttaaactcagataagaatatagaatgaagattagctacatggatgttacttgaatattgtcttccttccctgtcaaacttgaaaaaaagtccagtaattatatatataataatttatatataaattaatatatttatatttttatatgatatatatttttatatatttatattttatataatatatattttacattatatttcagataattatatataataaatatatatatttatgtagtttatactatatattttataatatatattttatgtattttatattatatatgtatatattatatattataatatatagtatatataatatataatacatacatatacatatatgtatatatgtactatatattatatataatatatacatatatataatgcatatatattatgtgcatatatacatatattaaacatatataatatataaattatatttctatattatatataattttatatatatttatatataaaatatatatattatatatattatataaatatagtttatatatgcatatataatatatactatataatatataatatatatattatatagtatatatatatatataatatataatatataatatattacatataatatatattatatataatatatattatatataattatatatatatttatatatactaatatatattacatatatgatatataattatatgtataattatatatactaatatatattacatatattatatataaacattatagtcattatactcaacagaacttcatattgcattttttaatatatgtgcctttatttatttatttatttatttattgagaaagagtctcgctctgttgctggagtgcagtgctgtgaccagggctcactgcagcctcaacctcctgggctgaatcaatcctcctgcctcagctgcctgagtagctgggaccacaggtacataccaccatgcctggctcgtattgtttttttagaaatggggtctcatcatgttgcccaggctgttctcacactcctaggctcaagtgatcctcttgcctgggcctcccaaagtactgggattacagatgtgagccactgcgcccagccttgttatttttaactccatggtcattacttactttccagtaatgtcaaaagtctaggataacataatagattattatgtgggttagctggaaggagggtaatgtatactgtaccacaatcttgtgccttgaaagtcaactaccacaggatcagtgactgaaaaacaggaggcttagataccccactcccagatatggaaattgtctgacatcctcttcgttgtcctttctttttactccccttcagtttacctttacttgcctttatcttaagggacacaatcccttctttaccagcaggtagaggtttccttggttttgaccctttgtgttatgttcactgtcattctctctccctaagaaacccagctaagggcccagccctcattaagccaggctcacaaagatccagacaagtctcctaaaaggcagatgaccgtggtaggagccatcagaagaagagaaactacagagacaatgtcagagaaaatacccattcagcagaaagaaagactcctaactttataaaaataaatcattttgaattatatacataggcttactttcccaaagcaacaaacctacttaacaacactttttggacaaactgttagtcatcttggaaaatgaaagcaatggatatatttagtgcatttgggctctaatatacattatcaatcacttgcaagttacagctcttcttaaactgtgtttgcttttctatttttcagttctaaggcagcatcattattctactattatttgaacccaggttatttttcagaaggaggaggaatgtaataatttcctatacatatattgttctgaaaggtagcaagacaagtttcagtgaggcagagccaccccaggtgttcattaaaatcacctggcagcatggtgggacacagtgttaatagaactcagtattaatgggacaagtgttagcggctctgtggcgcaagtgttaatactgattgcaaattgtgcttgatgatatacataggaacctctggatccttcacttacaaatagcatgaaatggtggatgaaaagtaatgccctaaaacacaggacagtttctaaagaaaagaaacattttccttgttcaaactagaatttaactctcggctgttctgtggttaagatctacaacgtagaaacatttcaacagtaactaacacatgtggcgctttgtgtgtagcagccactgttctaagtattttgcataaactcatttaatactcaacccctacaatgccaacagacagctaacagaattgttcccatttctcgtataaagaaactgaggctcagagttaaatgatttgcccaataccaaataggtagtaaaaggataaaccaaaatttggatgacatactttggctagagtccatacctctaaccamtggaaattgtgtgtctttttattattattattattattattattattattattattattattacaagcatcagtattttttatgaatactcatttcacaatggcattgatttaaaaaaaatcctacacctacatttgcaatggttcaatctttctaataacctaaatcagttaattaagacaaattgtcgactgagttagtgaacatattcaagctagctaggggtgtagataacttctaaatagaggatacactgtaatgactagttattccatacctagattctgtgcagataattctgctccttgaaagcagagattactatctttatattctgagcacctagcatagtgtaaacagtcaataaatgtgttgaatgaggatggagggtaaataaatcacactacatgaaggaaatatctgttggcattgagagggaaaaaaactgacgagggaggaggatggggaactaaaggtgactgtgagctctttgctgcctttgctccagtgttccagggcttccttactttttgcaaagctccaggatctgtatccttgctgtgcttgaacagagttcaggcagcagggcaaggggcagggagagcaaagtgggaagtcagaaatcagagcagccccgcagcagggaaactgcagtggytgagagtcacaaccccaccctcctgggagcactggcaggagtgaggtgcccaggaagcagacagagggggaggcagccagtaagggggcctccacctacttttcaaagaatcaagaagtcacactgaaagaaaaaaggatttagcctcctcttacacaaggtcttctgtcttcctttgaaaatgactttagaaaagaaaagacaaggttgaaaaggaacacaaaagaaagtcagactcctgcctagagagttaaaaacatgttggaagagccagtataaatcagcagctaatgccagtgcctttggaaaggacccactaccaggggttctggaggctggcctggtgacactgtttattatmcccagaaaaaaaattcttggaagtaagggcataaattgaaaggcaactcaatgaccctccttccctctgctttccatattcatacctttccatttttctggaatacagtaacatctccatgtcaagccaaaatgccatctcttccatgaagcatttccggatcaccagaaggatactttctctacatagctcttagatgtcactygtatagtatattcacttactcaacagacacatattgaatgtctgctatgtgctaggtatctttctagacactagggatacaacaattwaaaaaaaaaaaaaaggcctagcacggtggctcacacctgtaatcccagcactttgggaggctgaggcgggtggatcatctgaagtcaggagttcgagaccagcctggacaacatagtgaaaccttgcctctactacaaatacaaaaattagccaggcatggtggcttatgcctgtaatcccagctactcgggaggctgagacagaagaattgcttgaacccaggaggcgaaggttgcagtgagctgagatcgcaccatggcactccagcctgagtgacagagagggattccatctcaaacaaacaagcaaacgaaaaaaccaagatgcaaattcctacatttagggaacttacgttctactatagtatattgcacattaaattggagttgttggccgggcagggtggctcacgcctgtaatcccagcactttgggatgctgagacaggtggattgcttgagcataggagttcaagaccagcctgggcaaaatggtaaaacactgtctccaccaaaaacacaaaatttagcagggtgtggtagcatgtgcctgtagttccagctactcaggaggctgaggtgggaggatcacttgagcccagaagggcaaggttgtagtgagctgagatggcactaatgcacaccagcctgggcaacagaataagaccctgtctcaaaagaaaaagaaaaagaaaaaagaaagaaagaaaaataaagtgagttattgaagtctccaactattattgttgaattgtctgtttctcccttcatttctgtcagtttttgtttcaaatatttcagtgactcatatattcaaattgttttcaaagggatctaaaaaaagtgtgtcatgaggtatttcttaaattcctgctcatttttaacaaaatataacaattagtaaaagtaaaatagatcaagtatttcctcatttgactttaatttgccaaaaaataatgtgtagtgatgaaagctacaacataattaataaattagtaaatagtaaccacactattcagaataacactgctcaatatagagagtgggtgaacaatacactattccttataccaggaaactcctaaaaaagagacttgagttataggttagctatttcctcatggcagacaaaacagtttccattatccagctcatctttccgccctttctccctcttctcactccttttctcttmtatttagcaaatatttattttctcataagcctcagaaaatcctatctgaaagcaggtataaattgaaagcaggtataaaacattctttgtaatttgattccttactcactgtattagtctgttctcacgctgctaataaaggcatatccgagactgggtaatttataaaggaaagaagtttaatggactcacagttctacatgcctggggaggcctcacaattatggcagaagatgaaggagtagcaaagtcacatcttacatggcagcaggcaagagagcttgtgcaggggaacacctctttataaaaccatcagatcatctgggcacggtggctgacgccagtaatcccagcacttttggaggccaaggtgggaggatcacctgaggtcaggagttcgaggccagccgggccaacatggtgaaacaccatctctactaaaaatacaaaaattagctgggggtggtggcaggcacctgtaatcccagctactcaggaggctgaggcaggagaattgcttgaatccagaaggcagaggttgcagtgagccaagatctcaccactgcactccagcctgggtgacagagtgagactccatatcaaaacaaacaaacaaacaaacaaacaaagcatccgatctcctgagacagcaagggaaagacccgcccccatgattcaattacctcccactgggtccctcccatgacatgtgggaattatgggtgctacaatttaacatgagatttgtgtggagacacagccaaaccatatcactcaccctaatcaatcaacatttcctaagtagaatcacctatgctgagcattatgccacccttcttccaagtgaaccaaatctggccctgttctgccaacaaatcctagtctgaagccagagccattttctaaatctcatatttcctgcctaagtatgggggagtcatgggcttagctataaaaattcctaagactagggtggtatgagtgaatgcaggctgggcatagcagaaatgtagctctggcatcataatttcagaatcagtgacatccttagaacgaagtgcccccatcaatctaacaaaggaaacaaaaccccagcttaatgtttgctttaagttgccatgattttcctacagactcagtgctgcaagtcaatctttacaagtgttttttcagcctgggggcaagaaaataaacaagaccccaagaagtgttaggaaaggagaagacttttgaaactctactcctcctcagatgttccgagatacactgctccctcaagaatcttagtgagtagctgtggttatgatggacatgtgtaatacccctttgcaaatgttggaataaaaacaaaaatgagaaacactgatctaccctcacaaaaaattttggctcttctcaaggatgatctatatcctatagcttcaggactaaaaacagaagcagagaggtcactaattcatgtcataacatccaattgctccgtcaccaatctgctgatcctttcaccaacccactgcataacagacgttacatggccttaaaaaaatcctagaactctgatcagaaataagtttcattcattattaatgctaacctttcttttttttatgggaaaatgttgtgaaattgaatgagaaagacagcaaatacacagagcagatgcaactcatttctgagccatgaaccggacacaatacaaattcacctttgcagctctctaccaactgctcatgccctcagtagaaaaraagtcatacataatgtagcagtaaaactgttgacagcattccatggtcacagaagaccccgcgaatttgctgctgtggacatgaggatgtgatgtgcgaagcagggcctaatgagatttcgcatttctcttaacagtgtcctgaaggcaagttctggtacttgcttaacatctgcagtaatgtaagggattattgaaagtaagctttctatttcacacattttctgtatcagctaaacacacatgcactcacaaaatgccatcatttccttgttaaataatacttagatattcaattgttcatgatcttggtaaacacataaacaaatcatctagactagcgtggctcaaaatgctcctttcaaacaaatataaatttataagtttatgggctgggagcggtggctcatgcctgcagtcccagcactttgggaggccaaggtgggtggatcacctgagatcaggagttcaagaccagcctggccaaatcgtgaaaccctgtctactaaaaatacaaaaaaaaaaaaaaaaattagccaggtgtggtagcaggcaactgtaatcctagctgaggaggctgaagcaagagaatcacttgaacctgggaggcagaggttgcagtgagccgagatcatgccattgcactccagcctgggtaaccagagcaaaactccatcttaaaacaaaacaaaacaaaacaaaaattgtaagtttattcaaattatggattcttaaacttcatgaatgacggggatgtagtggttaatgtatgggctttagagagttatgaaaccatttagaatcacatatgcattgctatggatgaggagtccatgactctcatcaaattttcaagaggtgaaataacttcagaaaggttaagaatcactaatttagagaaataggtgaatagtccagtatatattcaactgtaatctcatgacacaagtaagaaaaagcaaactattatcagtaatttgtagatgaccatattaaacccacaaatgaatagatctgaaatattggccgtgtgaattctaccattcaattgagtcaagaatttatcatatgaagaaactgaaatagagaatgcaggttgaagcaaagataggtaaaattcttggggcaaaattttagcaatgcatcttttacccttcaaaaatatagctttattaagctataatatgaaataaatagcatatatttaaagtgtacaactggataagttttgacttatgtaaacacctgttctttccttccagagtcgagtagtttcctcaggcacatcagctgatcaggactcagctgactacttgagggggcagatctctagaggaggctctctgggcagcccttttctctattctctctcctactttatcctaggaactccaaatgccttggtcttcccagattctcagctccatcacctcaacccaggtagtcttctgtgctctgtctggttcctcctttctatgctgcatcttgaaagtaagctgggacaatggtaaggctcaccttgtttcccatctcccagggaacatattgataaagtgcctgatgcccagagtcttgtttcatatattttgcccttttttattgttgttgttgcttttgtagaagggtaaatcctgaccctgttactcctccctggcttttatcctttcaataactatcacacatctagaagcccctttactctttaataccaaccaaataactagaacatataatccataaacaactttagcaccatttacctgtgyagaaagaaaaatagcagagagaagatacccctgactttaacttgcatatttttacttgtctttcaaattttccttaatcatatcagacattttcagggtttatgattattttttgtcaaaaagaaaacaagaggcttaattaagggagtattgaaatcagcatattttagagaaaaacttctgaaattttggttacctacaaataaccattaccaaattatcagattctccaaataggaatggaaatggttcatctatctctttcattccttccttcacctactccctcctcccaccatactcatcccccatatcatctgaaatatgtcagttataccacttcttagcttccaacacagcactttgaactttgaacaaaccagaaactcaggggcctatacgcaccaggcaggtgatgtaaacaagtaaagtggctcaccacttaatctctctgagattcagtttcattatccataagatgtggttagccatgtcatctacttcctagagttgttgtgaagattaaatgagaaaaagtttaatcttggtaaatcctagagttttacaccaataaaagtcatttttaccaataagaattatcagaattaaacaagctattgtaatatccaaaactatgatcctgaaagcataaagattacatccaatatttctgtttagaggtcatatattagaaatatttccatctaaataaaacaggttgcgcctaaatggttaattcttaaacatctagaaaaggcagagcaatgaagcccctgaaaataaaaaataggtaaaattttaatgtagttttcattccaccatgtaacctggcttacacctctaattacaagacagtcctctctgggagggtgatatgagtttcctgcttattactgtactccctgcatccagcccagtgcttaagcctagttgggcatgatatttattgaagaaatatatgaatggatagatggctagatacatggaatgaatggtatgaataacgaatctcattttaactaattctgttttaacattgttttaaatctgttttaacattgtttcctcaggaatggagtttggaattcaggtggctttttctcagattacttgaagtttgagcagtccatgatttataataggcatataacaagttccccgggtgtttaacatcattaaatgttcttctctatctgatagatccttttgctaatattaaacacacacacacacacacacacacaaattaggaaaaatgtgaaaacagaagaattgttttagtgtcattgttatcaaactctcaagtaggacacatttttaaaaataaaatagaatttggtaaaactaagtctataacagtcacaaccattgtgtaattttaccttcattctactacattgtataattttaccttcattctactacattgtgtaattttactttcattctactacctgaagcaaataatttcaattcctaatccaagtagttagaagttaatgatatctttttgctccctataaaacctggcagctctatctaagatggcgtgtcacagaaaaatttcgccatttaatccttaaaacaaagtatccctttgcttccccttattgtagaggagagtgatgttgacataaagatcaaactatttgccctcaaatgccattatgagtgtataacagagaggggaaaatgtgcaatttagattagattattgggcttctagcagcctctccctgtgccaattatgggcgactttccatttacatataaatagctcggaaattccaacaccaatgtacttgaaaacactgaatcaagtagttcagaaaaacataaattagatgcatttcaatttaaggtgtttacaacaagcactcattcaagtaaataaaagaaatggaatcaatttttattacagaaagcaacatctttttaaattattgaaattatccccacactgctcttaaacccrtcaagatttcttttggcatgctgttagtttcttttgcaggggaagaaaggattaagtagttgtatacagttgtagtgtaatgtgggggtagataatgctggttttttatttcctctttttttctgtgtaagtcagagatgcctcttgagctacctggggccttacaaaagacgtaaataaaaccagatacactttttcaacataacttgcttttatctctctggataatccagtttaagttttctgtccttgtcacattctctcccactgaaagacatcttagaatgagtgtaacttcattagcagtctctaactgctaactcaccacagattaaccactctgtttattgatctattgcttataaagagccacttcaacgcccactgcagtttctcaaatggatttgatacatggtataaacaaacaactcagtatggtagagaacaaacaatattgtatatcactggtaagggctgagttctcatttgctgaattctcttgagggtctagacagatacaagagaaacgaaggctgatgttgtgttgcttatgtattgtaataatattagtgatgttatatattttacaaaatacatcacaattatttgttctttgaatatctaaaaatatttagttcactgaatttcacagataaaatagcacaatctaaaatgactagaatgactcaataatgatgtggttgcgggaaggaggcagagagaaaaagaaacactaattttatgtgaatgaaactgcagaccattttctgtcactgggacggctaaagtcatttagtgggaacttcctggtttcttctcggaggggattctggaggtacacagggtagaaatgctcttggtctacagacacagtgaagagcttgcaaaaatgactactatgcaagtttcattttcgactgataaatggtagagattattgagtatctactatgtacagggaagtctaatactgtttctctatgtgttacacaatattcaggcacatatcttgatatatctaaatgaagaacaaagaaatctcaactttacatttcatggggcagaagactcagaataggacgaaatctaaattcacagactaaagcggtattattgtttataatcacaaaagcttgacaacttagaaagacagactaggagaaatgattcctgaaaaatgaaaggcaaaagcaaatgaaacatttaataaggaaatttaaattcatgggttaaaaataagtcatatattttaccttaaaactcattttaagataaattttcttgaagtgtatagtttcaaggttcatatggttaaaagtttaagaagttcaaaaacaaatggaagaaataaatttaaacgaaagaataatagtataacaattgttaatcaaccttcctacacaaattaaacaatttaaatgagattttttcaacgttagccaaagcttggtaaagtagacttacattgacaagtctaataaccattaacttggtaagtctgtcatattttatgagattaagcacactcatactgagcacagggtcagtgataaacagcaaatactgtatattgtttggcatgaaacttttcccttggactctcccacattctctctcttccactcttcagtctacatattatacaaattagatcttgcaatcagcatagggaaatctcattactgctgaatatacttaataatcatcttctttctaaacaaagataacagcaaacagctctgaggaaatgtttatgcaaagaaaaagctatgtagtttatttctaatgaagatggtatgactgtctgcataacaggttattaaatacaccatcaaaaggagattctctaaaaaaataaactatgttgaatttcaagatgggcctcattatttaagaagtcatttccctaacagtttctagatgatgctaacatamcaaacttttagttagtattccatggttttccttgcattctttcttttctcttaatatcacactatgttgctaaagaaaaggttatgtattttaaaagaataaatgacatacatctgcatataaaatgattggatttgacataaggaagaaatcttatgagcaagactgtgaaaactaagctgcaaaataagattttcttcaaatgtcactggactctgaacctcccttttaagaaaatcagaaatacatctaatggattagaatatatagtgcatcaattaaaattatacttacataaaatatctattagccttctaaaagaatactgctttaaaaatattgcagaaactatccagacatgactaatgggaacaaatatgattcttctaagtagttataaatcagctgtcatgataaaatagtcacttattgcttgagttctcaatagatttaaaagtcatggacattgatccaatttccataaaccactgcataacctaggtacaacacagagtttaacagctttcatgggacatagttcaaggatggtcaaacagagaattacatcagggaaggatctggtttcagctcactgggagcaacagagatgagagccggcaatatcttcacacttttcaaagtgctcttgtgggtggttgggccctctagggaagtactctctccatattggaggtgaaaaaatggaaacataaaaaggtcaagtgacatatttagatcaaactattagtaagccactgaagagatacaggtagctatttctttgcatcaggtggctctgaccagagaggaatcaactttcaaagatttgttttaacctaagatccaaaggttttcactgaagtcatccagactacctaaattaccctatcaatgtctacagtccattagtgatggtcaaatgtcttctggcttttttgtcatgaatctaaaaatagtaagcctaccaagttagaagaaaatgaaatgactgttatagttagaaaacaaggtatttgggtatttcaatgtattgctcatcattttccataccagctataatttcagccacttcaatccagcaacacatttctgaaactactgaaggagtcaacctcatcttactgatttttaagaaaattattgctagtcaaacggaagaacagctttaaaaacactgacagcataagtggcttctggcaggattccagatcatgcttcttgggcaatgtgaaaagggaacaaaaaggcagtcacttaaatgagacagtgagagaatcacaaatcatagaatcccaaaacccagtggtcacaactgttccttctcccaagttcctgattctttccagaaagccaaactgtagctcattccagctcattaccacaaaaggaatattggattctgccccaggagagactcaatctcaagagccaaatcacaatgacaaagatgtgcagagttcaggattgaacctattgcatctaatcactagcagaaaatcagaccactgaggcaattgttttaaatattagtcacttcctacacttcctccatcatctaaaatttttttaaaatgtgaaaaaaaagcctataatatgtgctaaaaactgatgctacttaaaaaaaaactgttttcctttcattgaacaaactcttctttccttatttccccatttaatgtgaaaacatatgatctcataatgaatgccaacagatgatatacttagttttattattatgaagtattttttattcctttcccttccttcacatgggatctgtacagttaaaatatctacacaacaaacatgaggaagtcagagaagatgccaatttgactgtgattaaagatttagctatgtagtccctaaagaaattgcactgagttgctatccccaagactccagaggttcctttgtagtagaggtgagctatgaagttctcaactatgaaaggttaatacaaatgtattcactttatttatattagtaaaacaggattaactacatagttacccactgtatttactatactttagagcaaaaatgcatacagtaggaacaataaataaaagcaaaagtatatatatgtgtatgtgtgtacatacatatgtgtgtatatgtgtctgtgtatatatgtatgtgtgtatatacatatgtgtgtgtatgtgtgtgtgtgtgtgtatatatatatatatatatatatatatatatatatatatataaaatatatatacacgagaattagacaagtaaatggatgccataggatgggaaccagatttctcactgttagagtgagaggttagaggtaagcaagggagagtgattagaatcatccatatggtgatgaattatggtaggagacacagtatgaacacatgtttagcttaatatagatacagataattacatatagtaatgtttatagttatatgtatacacacaggttagtaatctatgcttgtatttcttcgttctgtcagctgagagggcctagaagcaatcacatatcagtagcaatgagcatacctagtgcccagaccttggtttctaacatcactccccaataaaaggcatccatgctccttgagaaaagggatgcttctaggacaagaacaggaaatataaaaagtgagcctggaacattttgtagtgctagaaaataaggggtgtaggggtgtgtgtgtgtgtgtgtgtgtgtgtgtgtgagagaaagagaaatcctatattgatgtggatatgtcaaagggacaccaaagccaactaaaacagctcccaatggccaaagctgaaataatttaatgaccaaaattttaaaaacatatcggattataacaaaaagtgtaaaataaatatccacaagcctacacagatataaataaatgactgaatacataaatgaatgaagataaagaggcaagtatatccaacggaggaaatccaaatgatttatgcctatactctgccctcaaagaggaagagaatacctctccactccttgagtgtgggctgctcatagtgactatcttctgaaaattatagtatagaaagaagagaaaaataataactttacagtgcagaaacctggcaaacattatttcagccaggtgatcaaggtgataaatcatgttgacaatatgtacccttgatacataatgaaaaggcactttacctctgtggtcttactccagaaaaaacctataatgccgctatgaccatgaaaaacaccagagatttttttttttttttttttttgagacagggtctcactctgtcaccgaggctggagtgcagtggtgcgacttcagctcactgcaacctccgcctcctgggctgaagcagtcatcccacctcagccacccaagtagctggaacgacaagtgggcatgaccatgcctggctaatttttttgtatttttagtagagacaaggtttcgctatgttgcctaggcagatctcaaacttctgggcttaaggtatccgcctatcttggcctcccacagtgctgggattacaggcatgagccaccgcatctgacctggaccattagtactggcaaaagaatggaaaagcagatcaatagaatagaatggagagcctagaattatgtgtagacctacataaatatgataaactgatccttgacaaatgacttcattaaaactaaaaacttctgctctatgaaaagcactgttaagaaaatgaaaaaccaagccacagcctgggagaaaatattttcaaagcacacatctgataaatgacttatatccaaaatataaaaagagctgttaaaatttaacaataaggaaacaatccagttaaaaaatgggcaaaacagggcagagtccagtggcttacacctgtaatcccagcactttgggtggtcaaggtgggcagatcacttgaagtcaggactttgacatcaacctcaccagtatggtgaaaccccctccctactaaaaatacaaaaattagccaggcatagtggtggatgcctgtaatcctagctactcaggaggctgaggcaggagaattgcttgaatccaggaggtggaggctgcagtgagccaagattgctccactgcattcaagcctgggtgacacagcaagactccatttcaaaaaataaataaataggccgggtgtggtggctcatgcctgtaattccagcactttgggaagcagaggtgggcagatcacccgaggtccggagttcgagactagcctagccaacatggtgaaacgccatctctaccacaaatacaaaaattagctgggcatggtggcatgtgcctataatccctgctactcaggaggctgagtcatgagaatcacttgaacctgggaggcagaggctgcagtgagctgagatcgtgccactgcactccagcctgggtgacagagcgaaactccatctcaaataataaataaattaaaataagtaaatagataaataaaaataagaatgggcaaaagatatggatgccctatctaaaatgaatacatatgacaagtatatgaaatgttcaatatcatatgtcatttgataattgctaattaaaacaattagatactattacacattcaaccgtgactaaaacccaaaacactgactacascaaatgctgacaaagatgtggaacaataggaactctcactcattgctggtgggaatgcaaagtggcacagccactttgaaagagggtttggcagtttctaacaaaactaaatagactctcatcatawgatccatcaattgtgctccttgttatttattcaaataagttaaaaatttatgtccatacaacagccctcacaggactgtttatagcagctttattcataattgccaaaacttgtaaacaactaagatatccttcaatagtaaacaaactgtgatacatccatacaacagaatattactcagcaataaaaagaagtaagctattaagtcatgaaaaatcatggaagaaccattaatgtatattgcttagtgaaatatggcaatctgaggaagctayatactatgtaattccaactatatgacattctgatatttatgcatgagacatgaaaacatatcaatacaaaaacttgtagttaatattcatagcagtgttatttacaatagccccaaactataaataacccaaaggcccatcaacagattaacagataaataaatagtggtaatatccatattatggaacattgctcagctataaaataaaatagatcactgagaataaactatagtgacataaagcacatcagtagttgccaggtggtaggtgtgatgggagaagaataactgcaaaaaggaagagaaggagtatgggaagtgacgtgaatgctttttatgttgaattttttataatatattgaaatgtacacataaaattaatgaatttcactgtaggtaaattatatttcaataatgatgattaaaaataaagtagttacaaaatgaggagggggaatgcagcaatcacgtattcaattcttccttgacacaaggttgtataaaggagttgaagtacaaagatgaattaagataaaattcttaccctgcagtgaatttacagtctagtaaaaaaagacagacatgtacacaatcagtgtaatataactatggtaagtataataatggagttataaacagaattttataggcataggggaaaggcattaattatacaagattcagagaaaccttgcaaagaattacgaatgagttgcgtcttaagaggtgattagaatttcagcaagtgatgtttcctaaccaatcataaggtatatttcatagttattttcctctatatttatctattcatccattgatctatccttccctccacctatctatccacccatctatgcctagggaaaggaagggctgtagagaaaattctatattgcggtatatagcaatatctagggattaagtttgtaccataagaatttgttattttgtattttatgtctaataatttctgcacagcagttagaataaatttatgctgtatagaactgcatatttactttaccttagcagcaaaaacttaaatgtgatcctctcagaaacttatctacttcaaagggtagcctagagctaaaacaggctaatgaccataacagcaccagaaactcgttccagcacctacaacaatacttaatacttagtaagagctgagtaaacattgttgaataaaaccaaaacagacagattgttaattcaactttattaaacttcacagaggaaaactccacatataaccaaactgtacttccattacagaccctgtatggttacagttttttaaatcattttctcaatcgagtcaataataggatgttaaaagaaaacagaatattaaagaatccaatactgctttgagacaggatcaaataaagccctgcttcaaaactgtaactgcttctccaagcttacaaaagtgggtagttttatttagacttactattactacttcattctgcattttctacaaaactttgaccaataacactggtaaatggccaacgtgtaaagacaatgacagaaataaaaaggtatcatctattaaccctgtttacacctttccacaaaaactgatgtttgggtaactgaagtagaaaagcaaaataacattttctaaagcaagcaagaaatagaagataactctaaacacaaatatggacaacataacctagtagttaagtacagatgctttcagagatgaggttacttggttggaatgagaccttaaaccaaagaatactgcaataaatagtgattgcttctacatatgtgatcaactacaagtgaaaagggtcaaacacacaggtgattgtgcagccataatttttgcaacattgtatacatgctgacatataccaacgctagcaataatatctttgagaattatggacacaagctatggctagatactttcaaattattgacaatttcctcctgtcaataagaagaaagttccagaaatgttgcacatcacgttagataacaataagaaattactagattatttatttttaaaaaattatcattggaggagtccttcttaactatctatattcttcaacaaagtaacccctttcctaaatggaatcatctgatatggactggcctggtcattccatctatacactgtataacattccacatttgaacttgggcaagttacctccctgtgcctcagtttcctcatctgtaaaatgggaatgacaacagtacttacctcacaaagttattgtgaggattagatgagctaatgaatgcaatgtgcttaaaacagagcctagcacataggaagttctataacttttagtcattattattactattttttattattattgctcatattattccttctttgctaccaaactacatcaataaatatggcattttagaactagtaaaaacttagaactaacataagaaacacaaatctctagatctagttcactgcttcttataataccgtttcctttaagtgcaagatttacctttcctccgaaaccttcctctataaactgggccccttaatgacaagagacgcactgtgaataaaattctggtcccagctctatctaggcctcccagaaagccccaggtaagtcatctcccctttggggcctcagctttctcattcttaaaataaaagtgttcgcatttgaggattattaaggtccctttgagtcctaatattctgattcaataaatccttcaggttctttaatgtattaatatgacattataaatttggctttttgacactttagaatttatctctagacacttaactagattataagcatcaggatcctctagggcaggatctttgttctctttcattcagaagttagatagtttagccaaaaaaaagtctcaaaactaaagtattaataaagccatcagtgcttctagaagcaaactggaattttattgatgttacacatctctttttaaaatactattacttgattaaaaagctgttgaattctatcatatattcttgtaaaagtgtatttttacaaaccagataactttatagtttctgagttttggataggtaaataagtggcttaacatgttcaaaactggggtcacttatttttctaatgaatccattaagattatacatttattcatgatatcataagaaatcaccatgtgggttttgcaattaaaaagaaatatttttgtttattaatgttttcaagtgatataatgttttgcaacagaaaaaataagcatatgaatgaaatgtcaaggaccaataatgagcagtcagaactgctgagcagatccctccctcttagctagtaacactgctgtataggatcactcaggctgaaaatgaaattttttacgaggaaaaatttaacattttgtcatcattacactgttgtgctataactgattttcttcaacaaggtggcaggtgcttcaatacttaaaatgctaagattcttaaaccaaactaacatatacatagtatggaacattaatcttaagatttatattttcaaatttgtagaggtctaaaggttttcaaggcagctgtaaacatatacaatttctcaagtggaggtttccaaagactgggaatgcaacygataagrtataaaatcagaggagaaacagtggaaaagtaaacataatataagagaatcacaacatgtaatgcagtcattaatttcatgagtctccttggataggtttaaagcacacttcagatgcattagtaggatatcattttatatttcagaaggagtactctcaagccaagcttctttgtagtaaatgaatcatccagctatattttgtgaaaaggggtcattttaatttcagggtcttttattgcccagcaaggtaactgtgaaatgacattcacaatataaataaattcagttgtctttgcttcaaagaaggtagttattattcaagcatttactttctagcttatcttacatactgagatttgcataatagatattggccttgttaacactgaacataaagcaaactttactagaacaatttacagtaattaattatgtacaattgcttctaataaaaggcataatgaaaagggagaaactatgtgcagaaaatagcaaaagtaagatgaagagatggtaaagttcacatatctgtttgtagatgacagttttaaatgtactgtattttgttaagaggtaaaaaagttgcggggatatcttaaagttctcatcctatctgtgtctaaataatctatccatcacagaaaaactctgtcccataggccagtgtgtgattgatagatactattatagtgaaatattgaccgcaccataactagcaaatgttacaatgaagaaccttaatttgaagttaaaatattttctcataatcaatagtaggtacagcagcatatcctaacttaagaggagagcctgtggccacctaaaagtactgacagaatttaaaaggcaaagaaagagagtaagaatacactgatttttatttttataaaatctaaatgcaattattcacaatttgggggtggtaaaaatgaaaggaaaagcaatacgttggtggctagttaattggaagcacagtggaaaaggagtaagcccacagcactgcctacttagttactgttgaggatcctgtcctcatcaatgattagtaatacatgaaagaggagaggaagtagtaaaagttgtcctcttttcaaacctgctaaagccaactaggttcaaagaccctgaactaggttagcaaactcactaaaatcaactatgatcctgaacggtatgcactgagcggtcacaataacytaggcaccagcatctaactaaaatgtaaagaggtgaagaggagttctggtttgttcagtaaaacagacccttgggcataaaactatacaacttctagcactcagtggaaatataatgaatagaaaagggagtacattgtttcatatgttaaataatctatggagaagagtaccattttcaatatttttcaagccaattttttatctgacatgagttgaaatgaagcatagttaaaaattaaaggggataatctttataaatcaagttattagtagaaaacagattttaaaatccagggaattgaatattggaaattctctcaaagtacaagtaatcaaacttggggacgataactcattaatcaaaatcaaggtttctacttgtggcctaatataaataaggtgatagaaatatatttctaagccttggaattcagggaattttttttctcttacatctcagacttcaaactttggggaacaggggtcatttctttttgtacataacttctatttcaaactttgataagcacaatgtatagaatagaatggtctgctttggaggcataaagatagcctgatctcatatctttcatcatttttcacatatgagttcactgcatctgttccgaccatcaattcaaaacatgtattttgattttaattttggaaaacataaaatctcaaatttaaaagcttaagtttcagaatgtatttattaaaactcagttattcaaatgacaactggcgtaaaaaatatagtgtggtctatttagggagtcaaaaacatgttcaaaacatctagtttatttttaataaaaacagaatatatgtttctaaacataagcaaatctctattaaccgttaaactaacataaatattacacttatgacactttaaggaagatatgctcagatgccatgtttggtaaagcttatgagtaggtagataccacctggaaaataaaaaactaaatttggcatcaagtatagatagcgcaattcaaaaaaattctcattaattcaggtcagtgagctctcccccctttgtattccctgcttgcatgttagtccatgtaataaagtattaacatggtagtggtttttttaaaaaccatcacaacaaaaaccgtccagttttactgcattaatcaaaagttcacaaaaatatgaaactcaagaagtaattccagcatctctattcctcccttaatcgtgtgcaaattttacctaagaaatatcttctcatcttcctatgcctttaattggctaccactgcattgcagcagcacattagcccaactccatacatgcagacccaactataaaagggtctggactgggcagggtggttcacacctgtaatcccagcactttgggaggccgaggcgggtggatcacctgaggtcaggagttcaaggccagcctggccaacacagtgaaacccgtctctactaaaaatacaaaaattagctgggcgtggtggcacatgcctgtaatcccagctactcaggacgctgaagcaggagaatcacttgaagccgggaggcagacagaggatgcagtgagcggagattgcgccactgcactgcagcctgggtgacaagascaaaactctgtctcaaaaaaaagggtctggtcactacactacataattatttcygtgattaaaaaattaaaccaaagtttccaaaaattatttatttgaaaagaattttaggttgctattaaataactaaattctttaaatagatatggagttgccaaaatgaccaataatattttacaggtggacaaatgttaggtcacctagactgatagcagtagtgatattgaaaactttattcaaacaacttgaatttttattcttactgaagcaaatacccagtttaggggatgttctaccctgagtttaataaaatgtattctgccaaacaattacagcaaagggagtgtttaatcaaatttatctaacatttgattgtatatcctgaaaatcttttaatctaaaagatatttatatctaatatttaaatattagatataaatatcaggtacagcagcatatcctaacttaagaggaaagcctgtggccacctgaaagtactgacagaattagaaaggcaaagaaagagagtaagaatttgatttaaatatataaatctaatatttaatattatataattatataaaatcttataaaccttataaaaccttataaaactatataaaatctaatattaaatctaatatttaatctaaaagatatttaaaactgatgcataacaaaagatgtataagattttaacttgggcaataaagcatggtatgataaatcaagttttagttacatcacttataaatttataaacatttatgtttataaattaatactgatgctattacttggctcaaatattgtactgaggaaaaatactcaactttagcttgcattcacttacaaacatacaatatcaacatacaattctagctgttctgagttatcattcccagctagtattttggtatgataatcttctagaagataatcctgcttagggattagtggctaattcttatgaccatgtaccacctaaggaaatttaaattattgttttcctggggctcacaaatttttgaaattttttcattaaaaaatatgtaagtgcctacaaggtaaaataatatgaaactaaacttagctgaggtgtggtctaaagaataagtttacagaaaaaaaggccttgaaatcaactaaatttgtttcacaaaatgagtaaaaatatgtgtaaataaaaagtctaagcatgtacttctgtcttcttaaaatgtgtctttgtggcagctcattctatcttctttattataaatatccaattatagaaaaaggcagcaatgatctcttaactgccagatgagtggcttttctagtttgcattcttttaaccactcaggggcacatgtaaagttaaactctttttgatattctgtctttccttggcttacgagatagcgttttcctgaatctgttcactctcrgtctacatttctgatgtgtgtttgtcaccagtcacttaagtgttactagatcccggggccctatccttgagaatctcctttccttttctatttgtactcttctactctgatggcttaaaattactaggtgcacatgattctgatttgttttcagcccagggctttcctttgaatttctgactcacacttcctactagggcatagacatcaggtgtcccgcatatagtacatagggatatgaggcaatctagtgtagttagtgtcaagagcataggctctgaagatagaatgcctcagtttgaatgctaagtctaccagttgtgtgaacttaagttgtttaacccttctgtagctcagtttccttatctgtgaaatggaggtaaaaataacaatctatattatagggcttttataagggtgaaatgaactttgaatggagactggcatataataagtattacatagtgtgtgttaaatgaaataagtaacactataatttatgattcttaaaatattccttataatcccccttatgcacatatttgtaaagttgcatgtcctgagttttaatatggccatcatagataccatttaaagttttttcttttttttgagactgagtctcgctccatggtccaggctggagtgcagtggcacaatccgggctcactgaaacctctgcctcctgggttccagtgattctcttgcctcagccttctgagtagctgggattccaggtgcacaccaccacacccagctaatttttgtatttttattagagaaggggtttcaccatgtttggccagactggtctcaaactcctgacctcaagagatccacccgcctcagcctcccaaagtgttgggattacaggcgtgagccaccaatcccagctaccatttaaagattttatcttgtgcaagggttaacttggtgatatctaagcttgaggcacttggataaacaacaagctcaagctcaagctagatgctcgcagaggtcaaagggctcctggttaggcaaagagaagcagggatatagagcaggccatgcttgatctattttatactccgcctaaaatcttagttctgcctaagagcttagtgaatagcatggtctgctctgccacaatagatgactaacatctaaattgggatttcaggattttaaagaagcttacaactttcaacctttctccattccttctaatccacaatacccttttcttgacccactctctggtattctgatgctagggaaaataataaagaaatttaagaaggctatatgtcttgaaagggcagaaattatgtcttgttcactgtaacccagcacctaagcagagtgcctggcttataattgaaattcgataaatacttcttgaataaaacaataaatgtcaaaagtggatggggcaaaagaagtcaaatttctatttctacagctgatactgctgactcaacatgcctcagaaacaaccatatactacactcccactccacctcacccaatccacacatactcctgtaattcctaacagtagctgctaatggcccaacctgtagtaagtctcaaagacaatccgttatatcctcctttaatttttaaaatatgaaaagaaatacagaggatcctttcctaaaggtgtctcttgaattaagcacatcctatgatttgatttaagtggcaaaaaattgatttttaaaagtgttaatacagtataatgataaggtattataattaactcagccaggaagcctgaaatttcatggttacttaatgtcccaccttcctccccttttcctctcaacgttaacatctcaacagtttatttatacagtactcaaaaatgcctataggaaaatacataaactttaaatgagatgcaaatttgacatctgccagttcagtcttgcacagttttatcttctccatcttagctgaatttgagagttttctttaggtacaaattcatttccttctaaatattatgggttaaacattaaatacaaaaagaacaaacagaatagtaaaaagctatgtttcaatactggaaaatgcaaatatcactgtgtgacctttgatataatagttttttagtctaacaccagaaataattatatcagtggcctgcttcctgccatctctacagaggtgtaatgaagaaatcttagttaatatgtactagacaagaaagtagcttagaagacaatgcttttaattactaaacaggaagcaaaaaacagttgtggacaggaatattaaatagagatcatcacttgaccttcaaatacaagagaatgactaataattttgtcagctcttttgtcagtaaagggatttgataggggtatgtaagaatgttcatagtccgaaagatactgaccctttaataaaaataataaaaacactgaggcattcaccaagttaataattcttgtcatttcagtatcaatcaaaagacattatgtcaagcaactatattctctgaaccattttcagtacagtgaacttaactgttccctgaatgccttctgatctatttagatgtttcttcaccagcatcatcaaaaacattatatagagtctcaccttcatatattatggaataggataaaatgccaaatgcagagaattaaatcaacattgcctttgatctctaaggacctagaatctgaaattgtacatactgggctgagcatggtggctcatgcctgtaatcccagagctttgggaggtcaaggccagtggatcacccgaggtcaggagttcaagaccagcctggccaacatggtgaaaccccgtctctactaaaaaatacaaaaattagctgggcatggtgatgagcacctgtaattccagctacttgggaggctgaggcaggagaatcacttgaacccaggaggcagagattgcagtgagccgagattgcaccactgcactccagcctaggcgacaagagcgaaactctgcctcaaaaaaataaaaataaaaataaaattgtacacactataattctggatatctttatgaacaaatcagataagccatttgtcaatctactgtcatatttcttaactattcaaaattggttgatgagtgacagatgcacaacactaacgcaaaaatggcatgaccaatggaaagaaacaaaggaaccaatttgatactttttttatcccatcaacaagttacaaatatgtaagtgggctttaagtgaactaatgaatgacaatctttttaaagtttacatatatagacagtgggtagttgacaactctggagactatttgattataatttatttatgtttatttataatttatttatacactgcctggacttaaggcagctaacagagctgtgaaaatataatgaaaaaataactttaaaatgaaaaagataaagcagagagaatataaagatagaaaagtaataaagagataataattaatatataaattccagtcaatatagccctgctaggcaaaactgctaaaagcactcacagattccactttcagctttcagacacaaagattacaacagctataaggtaaaacaaaatttgcgtctctgtaaaagaacaactatttggcttgctagttagcctactcagccaaaacaacaaaagaaatccttgattttttccatttccctcacctgtcagactcwatccattagtaaattctatgggctttacttcctaaatatatcctcaaaatatgcccattcttcatttctaatgacacaaccctagtccaatatactaccctttctcatctggattcttccaaaagcctcttatctggtctctgcacaatttattccctacatagtaaccagtaagatcatttaaaaacacaaatcaaatcttgtcactcctctgtatacaactgcctgtggctttctactgtactttcaacaaaatccaagctctttcccatgatatttgtgatccagaccttgaccatctctctaaacacatctctaggatccttaaaagtaaaaacaggaggcaggagaacagtcagtgccagagtgatgcaatataagactctatgaaccactgctggctttgaaggtggaatggagccatgagccaaggatgcaggcaggctgtagaggctggaaaaggcaggaaaactaattctcccctagagcctccaaaaggaatgcagccttgctgatgccttgattttagcctagtgaaacacatcagacttctgacctacagaattgtaaggtaataaatttgtgttatgataaaccattaagtttgtgttaatttgctataacagcaatttgaaacaaatacagattggaataaaaacctcccacccaagataaaaatacagaacaaaattatgaaacatcttttaaaagggtaacaataagggaaggccaataaaataaaatttaggagaaatactcactagataaaaatacaaatcttaacataatctaaagaatttgaaaaaagtttacaaactcaaaaagatgaaagatgacatgtccataaaataaaacataattcaaacaaattaaaaaataccaagtacaaatgaagaagaaacaattagaaacacaagaataaaatatgtatagtcattaaaattttaaaaagaaccaatagattaaataaactgtagacttaccacagtaaaagaaagaagtagaaattttcaaagagcattaagaggcacacaatgcatcccagaaagataatgcaattaaaaaaataaaggagcagttaaaggacatgagggagatattgagaagctccaacatatatccagtaggtgtcacacaaaagagagaaagggaaacaaaattaggagaaataatgaaaaagaagtttccagaactgaataaagatatatagaaaagtatacactgaaagtcaagaaggaaaacaaaaaataaatccacctgyagaaacatgatagggagtctataataaatgaagataaaaagaaaagcttttctcattagcaacagattacagaagactattaaatactatgttcaaaatatgagggaattagaactctataccagctaaactattagtcaagaatgagctacataaaagatgaatatcattcaaggtmtattttatcttaataatgaaattatgtccatatataccaaagamagggaacaagggatgaaatgataacaataatttacatttcgaggtgtttaccacttgccaagcctggtgttggggactctacattcactactttcattcacggagcaatgactgagtactcgggcattgggccaagagcgtacatctaacacaagctaatcctccaagcacttatcagataggcattatattaaaaataaaaataaaaactagggcccatggaagctaaagctaaagcagatcttgctaaagcaagatcatatatctcctttgctactttcatatagctcctcagctactaagtggcagggaatcatttgcttacacttttgctgtttcctgtctctatgctggaaacacgtcgttacctctgctgggaatgtcttttctcatcccctaaccaggcagtttaacttcaaaatgtcttttttggttttttttggtttttttttgttttttttgagacagagtttcactcttgttgcccaagctggaatgcaatggtgtgatcttggctcaccacaaccttgcctcccaggttcaagggattctcctgcctcaaccttccaagtagctgggattacaggcaggcatcaccattcctggctaatttttgtatttttagtacagaaggggtttctccatgttggtcaggctggtctcgaactcctgacctcaggtgatccacccaccttggcctctcaaagtgctaggaatacaggcatgagccaccgtgcccagcccttcaaaatttattttaaagtttttttctttctcttggatttcaakatacaaccttgaagcaaactgtagaagcctttttccttagtcttaaaatagattctatgaccctccttttctcaccgtatgtactcccttcacactcatctaactgtatgctaatatctaattatgtgtcttcttagaaattccaggggctaatattgagacagacagacttggtctagagacccagctgcaaaataccagagattaaggtggtggctagttaacaacccagccattgttgagacatcagtccaaggtccaggtggactgggaccaaagacagacagccaccaaaacaagatacatgtgcattgtactcagcccaattcttgcacaccttccttatcaagctttccctttttaaatgcctgccatccccccaaaaagcgaagcagttactttggatagaaatctggctgcttcctgccgggtgtggtggctcacgcttgtaatcccagcactttgggaggccgaggcaggcagatcacaaggtcagaagattgagaccatcctggctaacacggtgaaaccccgtctctactaaaaaatacaaaaaattagccgggcgtggtggcaggcacctgtagtcccagctacttgggaggctgaggcaggagaatggcgtgaacccgggaggcagagcttgcactgagccgagattgagccactgcactccagctgggcgacagagcgagactctgtctcaaaaaaaaaaaaaaaaagaaaaaaaaaaagaaaaaaagaaaaaagaaaaaaagaaatctggctgcttcccctttactagttttggttaataagttcactttctttctaccagatcttgctcttgttaactggactctgcaagcagtgagcatctgggcctgcttggctcggttacaatccttctggaactgattcaaataccacctttgtaaagtctttgctgaccaccaccatcagtcaccatagttgcttctattctgttttyccactgaggtacatattgtaccttaatcatagtacttaacatactaacactggttattgttagatgctattttgggggaaggaggcctgtaataccaccatagtcaataaatatttgttgaataagtcaacaagcaaaataacattttaaaatatatactataatgctaggtacatcgtcaagaggttgtgattattaacgtgaactctgaggaatattatatttgtgtttcataaagactataaaaagacaacttggtcagagcaggatattaggaagaagtgaccataaataaattcatttaaataacttacatttcctgagcatctatcttctgcaaagatagatgctcatgtactgcagggacaccaagctggtcgctgtcctcagaagagattctgacatatccaaatgctacgtacattagtttgaaatctaagaaaaagtgtgcattaagtggacccagagttgttacactgccatgctctattagtagagaccaacttaaatatataccattttatctgatagccaaatacctccaggcatcttttaaaattaaaatgctaaagaaactgctctgtttaagcttagggcattgatttttatgatacttctttttttttttttttttcttttttttttttgggacggagtctcgctctgtcgcccaggctggagtgcagtggcgtcatctcggctcactgcaagctccgcctcccgggttcacgccattcttctgcctcagcctcccgagtagctgggactacaggcgcccgccactacgcccggctaatttttttgtatttttagtagagacggggtttcactgtgttatccaggatggtctcgatctcctgacctcgtgatccacccgtctcggcctcccaaagtgctgggattacaggcgtgagccaccgcgcccggccgatttttatgatacttctaaaaagtattaagggatattaaaacttcagcctatagctaagtgaccttttagtttctttaaacttccagataattgatcaccctttgtaggaagttgtcattacttcagaatgtctattccctttgatccaccccttaaattctacatacttagaaaattttcttttttcttaaaagtgtacgtagcaacagaatattaaattggctctctttgtcctagttcatctgaaatactggttaagaacaaaaaactatttgtcaaatacttccaaaacaaattccaaagcaaaggcaaaatgcaagaccatttttgcaggatttgcaaaggacgcagtcaaaagttttgcagttcagcacccacactgaggccataaagggactgaagacagtaaatatttaggggaaattaactgctgttccgtgagtcccaccgcccccatagggaagtgtgagaaatgaaaagagctactgggagatgccatctgagagcacagtggacagactggtctgatctttaccaaagaaatctaagaaacaggctggctgaagaggactgtgagggaactctcctctccttggtcaaaggtttcaattttgaggaggcacagtctcaaatttcaaaatttattccactggaatagtgctagtaaagtaaaatgattgtgctccaaaatgaagtatataataggcattcaataagcactcactggataatcccatactgtcctttcacgaaaaccttttctaatgcaatcaagtggttttaatccatagaaattgatgtccactgggagcaatacagtaaagaatcttacagattttgaagccaaattcaccatatttaaattataactctctcacttcccccttctgaaacttgggagaaattgtatcaatctctaggagcttagttcttccatctgtgaaatataggtaataaaacctagttagagggttgtgatgaataaagaaaacaactgtaaagtatcagcacaatactgaaaagtctaaacatatcagcccactctctctcaccccatttctattgacgcgttctttctttaggtatgttaatgttaaatggtcttgtttaaaggggacatcttttttgctgctttttgcctggcagattgacagtctttttaaagtgatcttacaatatgtgaattatctaccgtgtgtggattttagtagtttaaagtctccgtttcggggtgactcaatgcaactctaattgctgcctgtttatcaataccagcctaaaaaatatatcattttgggttcaactacatttgtgcctaatacataccacatcttttcaaaagttacgtatttatttatgcccttaaaaacacacatctgtggtatccatgcgccttggaaaagaaatcagaactgggtcagttgaaagcacaggatatattcaatctgttttagtcatcagtcctcttgtctagaaaacttcagtgaaagctgaatgagctaattacaggaaaagaaattaacaaataaaaaagctgacttaagagttgctgggaaacaaaggataaaagaaaatattcagcatcctacataagtaggatgtggtttaagttttcttattgcttgagcctagaaggtcaaggctgcagtgacctatgagtgcgccactgcactccagcctggtcaacagagtaagactctgtctcaaaatttaaaaataaacaaacttttttttatggtcttaagtatttttatgcatttccctgagtccaaaatcaaaggcaaagggagactagtgtatgactgtttatttctatattgtcagcattttaagaaaactatacatagtttttctcttatgtcactgagttattttgtttctgagaccactgaatattttccctggggagcataggaaagtcttcaggaaactatcctgaacgaatgcatctagtgaacagtacacaggacaaagaaacaggagaggaccagtctttgttctgtgtcctctgaagagtcacatctattcttattatcatcagaatatatttctgaagtgtttcaaagccttttgataaaaactctttataaacagaaggctgcttatgtcagttcaaaaattctgaaattcactatagctcaagctttcgtatttgaaaatctcctggggaaaaatatttgagaaatgtctaccttttgagatataagttgttgtctaaaaaaacaaacaaaaaatggattcattctaattgtggctattcatggaaggcaccattttaaaaagtcaaagcatttatacattgaaacattcttttattggtaaatcttaggttgtcccatttgaagaatcatgattgattctatcataagcagcctatcttttagaataggtgacaagaacattggtgatactgtaaaccaaaaatgaaattttaagcctccaactgactcaatggacctctccttttggcctaggggatcccagagaaatctgaaaatgtagcttaggccttgacaggaatggaggagggatatgcttagttatccatgctccctttggagtttaggcacaaatgaccagcattaacattaaaatagaggtcatcagaatgacaaaacagattctttgtagcaatacccacctccaaactgtctctggtatagcatcacaggaaagatggcaggccctgaaaggaatcaaagtattttatcccaaaatatatttctttgacgtattttaaaatggccttccaaagccatctcttgtggaggaaatatgcattctgtagagaatccctttccctttccaggtcttttcctgacccaggagagagtaactaagagtctgacaccttttaaggtctgataagagacatttaccatctattctctttgaagcctgctacctggagccttgatctattactatataacaagaatcttcacttccaccatccccttttaccttacttaattcaagcatttatttctattaacttcaactctttaggcaaagcttaactttttcaaccaattgccaatcagaaaattttggaatccatttatgtcctggaagctcccccttcaatgttctagatgtgctgcttttccaggctgaaccaatgtataccttactgtattgatttatgtctttgcctgtaacttctatctccctaaaacgtataaagccaagctgtaacccaaccaccttgggcatatgttctcaggacctcttgagactgtgttcctggccacagtcactcatatttggctcagaataaacatcttcaaatgttttatagagtttgacttttttttggtcactagtatcaatagtaatatcaatagtagtatcaatagcctgccaagaaagaagacagagactttatagtgtggttttccccttcagaacaggtgcttctttgcctctactgtctaaattaataactagcttctttgttgggtcattcccctgttctttcctcccctaaaaggtttctgttttctcccacaaaaattcagcatcagataagcttagctatatctrtatcagagtgttagcggcagcgaatccatacaggtctacaggaacctcaattcttgccttctcagaagaatgaatttgactaagggccataacgcagaagcagagaccaaggcaagttttagartatgaatgaaagtttattaaaaagctttagagcaggaacaaaaggaaggaaagtacacttggaagagggccaagcaagcagcttgaaagatatgtgcatgatttgaccttttgacttggggtttatatgttggcatgcttccagggtgttgcatcccttccctcctgattcttcccttggggtgggctgtccacatgtgcagtgacctgctagcgcttgggaggggagcatgtgcagtgtgtttactagagttgtaggcaagctcacttgaggtgttctttccttaccagtcaaatggccctaggtggtcatataccagttaaactccaacattttgcctcttaatrtacatgcttgagctcactcacccagctcctgagatcttatcagggagctgctgatcaccaatttcaggtgtttatagaaagactgcctttccctagtgtcagctgtgaccaattattattttagagagacagggtgacaattgcctgaccatcacctgagggttgcctgacattcctggtggtgggggctgagggaagagtcctctcctgctttgttcatgcctgattagctacctactgtaacaagaggacatacattatagtagagcaagaaatccaagaaacacatcacaggtaggaaactctattcagtgccaaatgcaccaaataatctgctataaataagtgtatctctgctgtgtcaattccacaagacttaacaagaaggaactatatcagattacagaataataaaacccatattgctaaacaaattaagcattttatatttattattttaattcaaattaaccaagttctttatggtagtgaggtaaggtaataaaaaaacaattcattttcagagggaaattagatttatatgaatcattaccatgagaagaatcaatgaattggtaatttgtaatgacaggaaaataaaaaaatgggtcactagggaaagaagcaaatcagtgcactaaaatctttaaaaccaccacaatatgtgaaaacatatttttaagagtgtacttaaaagatttctatttgatatattttaatatacaggaatttaaaattcacccatacattgatatctcaattttcaaaaaaatctatgccactgagacagaagatttttgaatcattctgttgttttgactttttaaatgtccttttctctcctcagctattttttaagcataagagctttcctatcttgaagacatttaaaaatagttcattctgaagaaactatcaaagggacatcaactggcacatatgcttggcatcagggcacaccaaatggcccaattaaaccatttgcagtctttacaagatacaatttaaatgtacccaagaaatgtcaaatggttcctcatgtagaattatctttaccaatgagctatgtcccaggaactgagcacctaaatccctgcagaaatccatgaggtacagtttgtctcagacacacactggagcatgttaattaccacagaagagaaggcgttttcaagttgaacacaacgatcagaaatgccttcttcagtatggaaaatatggtcagaggaacatcaaactctgccagcacctccctctgttggcaagtgtattccccataccaggttctaaaatcaattgctctaaaatcaatctcaggaggaaaacctctatacttcttcctttctccactgggaaagtcttcgacagttcaggatatgtcttcccgatgtgataaatttaaagaacaatagtaaaagatagaagagaattcctagtaaagttacaggctcaatctatatattcttcactagaaaaccaaaatacagcaataaattaggaaacaaaatagttgggctggctcaaaagtgaccaccactagtagcactgaccctcccacccatccctttctctagtcatggatttgacacgtttcttccttctttttttttttttcccagaaacagggtgccactctgtcgcccaggctggagtgcagtggtgcaatcacgtctcactgcagtctcaaactcttgggctcgggcaagcttcccatctcagcctccgagtagctggaactacaggtgtgagccaccacgtccactttttttgtagacacagagtcccgcaacgttcaccaggctggtctcaaactcttgactttatggaatgttcctgccttgctcagcctcccaaagtgctaagattataggcgtgagccaccacgctcagctgagttggcaagtttctgaacgtggttctacacctggcacactgatgcaggaagcctgcacctcagaaggcagagctctcatagcttggctgcccttacttcctctttggaagcctgtttccattgctaagataccctgacagggattctcttcctaacccgtttgcaaacctttgctcaggcctctgttctcttccgcactatctaactttctgctgggtgctggtttctaattttctttgacccctgtctgttgtcaaactgctttcgtaggctggatccttgggccgcacttcttcgccactctgcagaagcttaattgctgtccttggtcaagaatatataatgacaactgactgaaaaataatccattaggctccaaaggacataatgggtagagggatgaggaaattcaggagaaggagcagaattacttgtaagcctataagcatcagcctaascagtaactatgcatatatctgaacatacattcttataatcatgggatccgatgtgctaaattctagtagctaatacgcaccatgccaataccagaaatttatcatattgatgtatgtgtggcaatgacatacttaggctagtgcttttagaattggcatatttaataaaaactcatgacattgaactattttttaatattctgtatattttatcattaaagcctaatatcaaaaagctatgttactttaaattcatctctaattctatatttacagatacatttaagaataacctgtttatttaaacaactaatatatctctgagtatattcatatctatttagcatggcatagcatttaatagattgttattaatgaaaatctagtaaaaataaagcaaataacacaaatgcagtctttatcatttataacataatcagttccataaaacactacactaatgaccttctgtcaaccatatagcagaacatggcaattttgctcagtgatatcttcttcctgcctcttaggcctggagttaagatgaagcctgagatgtaaaaccagacagaaaggaagcccttatatttacacacaataattacttggaaatacactcatcagattaaatccctctaaatatattgatatatcaacatcatcaacatcgtttcaagtagctatgttagatatttaaaacatttgaggtaaagccctttcgtaataattacaggtgacccttgaacatcacagggttagagttgctgactctgcactatcagaaatccatgtataacttttgactccctctaaaatttaactaccaacagcctactgttgacctgaagccttactgataaataggcagtcaattaacacatattttgtgcatgtattatatactgtattcttagaataatgtaagctggagaaaagaaaatgttaagaaaatcataaggaaaagaaaatatatttactatccattaagtggaagcaattaatcataaaggtcttcatcctcaatcatcttcaccttgagtaggctgaggaggaggaagaggagggcttggtcttgctgtctcaggggtggcagagacagaggaaaatccacatataaatgcagttcagccctgtgttgctcaagggtcaactgtatacaagtaccccaaatttacttaagagtttaacatattaagttggatttcacttctagatgtaattaccttggaaactttcatttttactcacagatatgattttttcaaattgttaataaaattcttttttgagttcataaaggacacgacactttggttgccaccgataataactaattttaagatgctctcacgaatcatactctctccttctctgcattttttagagcctgcttcccacatttgattcattggcatggtgcattcacccatagtgcaggctgatgccttccataaggtaggcaccagccatctgcctcctccattcctccagaatatgaaagggactcagactgctttgagttaatcatctcagagaaaagaagacgatactaagttggtttttaaaacaatagtctttttctattgtaattcttattaattatagtctaacaccaaaaaaaaaaactcttttgtaaatcttacagaacagatatgtaagaattttttaaaataacatgacaaataaaaattatcccttggttaatatgccatgggcatttattgtacagaaggtttaacaatatttaccattcatagaaagcagcttacatattaaatgcaactgaataaatgggaacctatgttaaaactgccagtgmaatcacacctatcagtgacactagtactctcaaatctaataaatatatcctttcatattatgaggaataggcctaacccttctgtcaaaattctaatcaactggatgctcattaagtattatgtggtgctttcaagcctgatgaaatgcaacctctaattatttggcaatcaaaagaaaataatcaaataatcactgtaaaaacttctttctttaatgtaaaacatgtggccattataaaacattcttgttcatgaggaatttcttcaactgtatgtatggatttatatatatatacatacctgcacatatatacagcatatgtatatgtgtctgtattatatgtattaaatgaaagattatccacattttgttctttaggatcttcagcagctctcttcccatcacaatagaaaggcctgagctaacatttccatttctgcaaaaggcagattttgttcaattaaaaattataatgccttaaatttccacaaacacatgaatttatctatttttcttttacaaacccatataaacatagatgcaggcaccccaaagagagaaaaaaagccacatcctttttctaactcaggctgtcatcccactcaaagacaatctattattatgagttcaaacaaaagacaactaataaaaatattatctacaaaaaatgtacaccaagactgtactgttattacaaaattataatgtgtattttacactcatttctaaaatgtcttggctagcttgtttgcaataattcaaacttcagatttaaaagagcaaacaattcttataaaaaacaagctgaaactaaaaagaattcttggtgtttgtaggacacagtctattctcattaaataggaactcaggatagaatcacaaataacacaattaaagagaacagggttccttatattattattttaaaatgaatttgcgcatttatgaattgggatgattagagatgaaagaataaatcttacacagctcagtttgccacactaccttctaactcatcttaaacacaaggctttaagaactcacaaattatatcagcatatagaaacccaagaatacttatacaaattattgccacctactccacccttagagaaattagcagaagtcttaggaaaacacccacccccaacaaatgacccagcctttactgacttgagtcctatcctactaatgcttttgaaaaacaaaaccattgaaaatggagctgaaaactaaaatcattatcttgatttttctttaaaaaattcattccattatctcactttgagactttatcactgtgttttttccttccttatgcctcctttctcacatctcttttttttaactttttatttatttatttatttattttgagatggagtcttgcactgtcgctgcggctggagtgcagtggcgcaatctcggctcactgcaacttttgcctccygggttcaagtgattctcctgcctcagcctcccaagtagctgggattgcaggcaccggccaccacatccagctaattttttatattttcagtagagacagggtttcactatgttgcccaggctggtctcaaactcctgaccttgtgatccgcctgcctcggcctctcaaagcacagggattacaggcatgagccaccacgcccagccttctcgcatcttgtcaatggtagataagtaggcagtacctttgccatgtaaaataggaccataaactaaaatgaaattaagtgtattgtttaaaagattttaacttctctatccacatataggatagtggaaaacataaaccttttctgattgttctagggaaaagtaagcattttcccctctatagcaagtgacaaaagactgtagttctctaaaatatttaattattacagacctatctcccctgctagactaacacttcatgaggggaggggtctatgttattatcacctctcttctcccagggactaaaacagtggctaaaacatataaggcactcaaatgctcacttaattttatatattttagcatgagtatttgtcatttacatattctgctgaccaaatgggataggcaataagctactgctcaaaattttaacaggagaccacaaagtaaattctccccaagggtaaacttaatatccttgccttctcatgatggtgacttcaagtgtctaaaaatatggcactctacatgccataagaaggtactgccttttcattcagggtatgaatatataaatatatctttgactttacagcatatggtaataacttaaaaattatatgcctaattgtgaaaaaaaaaaaagaaaaaaaaagaactcttcttgccagaatccaagtcccatgaaagtagccaatgctgtctcattagttagtaagctaatggaaatgttgccagcatttctttcagtgtctagaaaacagagtgtgcaatgtgccaagtcttcactgatttatttttgtaagcagcagtgtaataaacccaaagaagccaaaaaagcaaatttttaaaaaataaatattcatttgctatcaagatgggtatgacctttttacccaagcctattactgacaattcagaaagactatgtgaaatagtcactcatttatcttaattgcatttgcaggtactaccaccactcaagttttaaaatgtttttaaacactcaagtttgcattcctttagcttttatacaagaaaccacattattttacatacatattaattattttctgacctttcaggaaaacccaataatataaatctacaaaatgaaataatactcaagaattccacttttctcccttagcaatgcctgcacataaccttcggctttaaattcactgtgttttatgggaattctacaaataagcaccatagcggggctcagaagcaggcatgtccaggagtaaagctggttgagttctggctccaggacttactggttgttaatactttggggcaagttatctcagctttctaagcatcagtcttaaatctacaagatggagataattcagtatccatcttagtgtttttgcaaaagatctaaatgcattaattcatgtaaagtgcttagggcaactgaaaagtcaacagaactcaataacaattattattatgcatcaatatggatacttgtttaaaaataagctgcttgggaamatggatactgtgtatattttcaaagcttgctttctctccctgttttgattcagatactgtcctaaaactttagctatttcacttacttagatgaatttcatcctcacaaactataagaaacctacatattacggttctcggatttagacaaagttaggacccaatgttcctttttaaaacatctcaacatttctataatcttttatgcataataaaatatcaaaaatagactagacttgcaatagaacagtgtttattttcatggttgcattcctaaaacaaatgtataygcgtgaagtctggctatttaatcacctgagacggaggagtttcatgctggagatagaatatcagctagttttcaaaaccaagtaagatttcagtggtgtacatggcatacaggctgggctaagtaagattaacagactgaagataagtgggcacattattcagagcacagagattaatcagactggctagtgagccatatatactagtgagaaggtgatcaatgaagcaggaaagactaggaccaaaccacagagggccttgactgactcgctgagcctggactttgttttctgggcaaggaggattcattttcaatagtttgcaggtagcactgcttggaggagctggaaatgacgaaggggtgaatttatgaattcagagactggtatcagttgctcaaagtgggggacttaaagggtggccaggggtaattaatactcaattcctctctctccctcacattcctcatctgcacctcctatcaaagctacccccaaatacatctcaagtccacaggttcttcaccataagcactgccacctcaattgtccatgccaggctcaggtcttcgactgctttagcaaacttctaagaggtcttttgggctccactttgcactgttcccacccagtttccaaaacacatcaattctccacagttcagccaaagtaatatttaaaagtgtaaactcaatgatttcattgatttacataaagacctttcaatgattttcctatgattcttccattaaaatctatgttcttcttctttacttacaggagtctagctgcatgaatattcttccatttactcttcaaaccaagcttcctcctgcctcaggaaatattattccttctttacagagtgctctcccgccaccacaacatcatttcagagctggctcctttccacctttagcatctcagatttaaggtgatctccttccacacttgcttagcaccctttcttttccttaaagtattttctgtaatttagagctcttctattttgtacatgtgtattagtccattttcatgctgctggtaaagacacacctgagatcgggcaatttacaaaagaaaggaatttattggactcacagttccacatggctggggaggcctcacaatcatggtggaaggtgaaaggcatgtctcacatggtggcagacaagagaagggagcttgtaaagggaaactcccatttttaaaaccatcagatttcatgagtctcattcattatcatgagaacagcacaggaaagacccaccctataattaaatcacctctcaccaagtttctcccatgacacatgggaactatgggagttacaagaggagatttgggtggggacacagagccaactgtattgttctgcccctacccctcccaattctcatgtcttcacatttcaaaaccaatcatgccttcccaacagtcccctaaagtcttaactcatttcagcactaacttaaaagtccacagtctaatgtctcatctgagacaaggcaagtcccttctgcctatgagcctgtaaaatcaaaagcaagtttgttacttcctagatacaatggcggtacaggcattgggcaaatacagctgttccaaatggggaaaactagccaaaacaaaggagatacaggcctcatgcaagttcaaaatccagcagagcagtcacatcttagagctccaaaatgatctcctttgaccccatgtctcacaaccagtttacactgatgcaagacatgggttcccatggtcttggacagctctgcccctgtggctttacagggtacagccctcctcctggctgctttcatgggctggaattgagtgactgcggcttttccaggcacatggtgcaagttgtcagtagtgctaccattctggaggtctgggggacagtggcacacttctcacagctccactaggcagtgccccagtagggactctgtggggactcccacctcacatttcccttctgcactgccctagcagggattctccatgagagctccacccctacagcaaacttctgcctggatatccaggcatttccataaatcctctgaaatctaagcagaggttgccaaacctcaattcttgacttctatgcacctgcaggctcaaaaccatgtggagctgccaaggtttggtgcttgtgccctctaaagccacagcccaagctgtaccttggccccttttagtcatggctggagcagctgggatgcagggcaccaagtccctagacagcacacagcacagtgactctaggcctagcccacaaaaccattttttcctcctaggctgctgggcctgtgatgggacaggctgctgtgaagacttctgacatgccctgaagacattttccctattttcttggggcttaacatttggctcctcactacttacgcaaatttctgcagcaggcttgaatttctcctcagaaaatgggattttcttttctactgcactgtcaggctgcagattttccaaacttttatgctctgctccccttacaaaactgaatgcctttaacagcacccaaatcatctcttgaatgctttgctgcttaaaaatttcttcctccagataccttaaatcatctctctcaagttcagagttccacaaatctctagggcagggcaaaatgccaccagtctctttgctaaaacataacaagagtcacttctgctccagttcccaacaagttcctcatctctatctgagaccacctcagcctggaccttatttttcatatcactatcaggatttttgtcaaagccattctacaagtctctaggaagttccaaactttcccacatttctctgtcttcttctgaaccctccaacctgttccaacctttgcttgttacccagttccaaagtcgcttccatattttctagtatcttttcagcagcaccccactctactggtaccaatttactgtattcatcagtttccatgctgctgatgaagacatacctgaggctgggaaatttataaaagaaaggggtttattggactcacagctccacgtggctgtggaagacaacacaatcacacggcggcagacgagaagagagcttgtgcagggaaactcttactttttaaaccatcagatctcatgggatgctttcactatcataagaccagctcaggaaaaacctgcccccataattcaatcacattccacaacacatgggaattgtgtgagttacaaaatgagatttgggtgaggacacagggccaaaccatatcatcctgaaggaggtggattgatagaatggtggaatggctttttgaagtcacaattacaatgccaactaggtgataatactttgcagggctggggaaaagttctccagaaggctgtatatgctctgaatcagcatccaaaatatgatactgtttctcccatatctaggattcatgggtccaggaatcaaagggtggaagtagaagtggcaccattcaccatcatccctagtgatccaatagcaaaatttttgcttcctgttcccacagtattatattctgctgccctactggtcttaattccagagggggaaatgctgccaccaggaggcacaacaatgattccattaaactggaagttaaggttgccacctggacaccttgggctcctcctacctttaagtcaacaggctaagaagggggttacagtgttggcttgggtgattgacccagactatcaagatgaaagcagtctactactccgcaatggagacgaggaagagtaggcatggaatacaggagatcaattagggcatcacttagtattaccatgccctgtgattaagttcaatgagaaactacaacaggccaatccaggccggactacaaatggcccagacccttcagaaatgaaggtttaggtcactccaccaggaaaaaaatccaagcatgctgaggtgcttgctgaaggctaagggaatacggaatgggtagtacaagaaggcagtcatcaatatcagctacaacctcatgaccagttgcagaaatgaggactgtaattatcatgagtatttccttcttttgttaaaaacatgtttgtgcatgtatacacttgtaataagaaaatatcttcattttatttcctttttcctttatcatgtgacataagatttattgacttcatatcagcatttaagtattgctaactttatataatagcatttggtttggggattggtgcatttccggttgtagaaaggatagctatattatgttagacataactaagactttattattgtctttatttgaagattaggtatgatctcaggagatgtgtatgggttcaagttgacaaggggtagacttgtgatgattaatactgagtgtcaacttgattggattgaaggatgcaaagtattggtcctgggtctgtctatgagggtgttgccaaaggagattaacatttgggtcagtgggctaggaaaggcagacccactcttaatttggatgggcaccatctaatcagctgcctgtgtggccaggatataaaggaggcagaaaaacatgaaaaggctagactggcttagcctcccagcctacatctttctcctgtgctggatgcttcctgttctcgaacatcggactccaagttctcctgttctcgaacattggactccaagttcttcagctttgggacttggactatcttccttgctcctcagcttgcatacagcctattgtgggaccttgtaagataatactacttaataaactcccttttatatacatatctatcctgttagttctgtttctctagagaaccctaatacaatgtgtgtgtgtgtgtgcgcacgcgtgtatgcgcgcgcacgcttggttggttggcttggcttttgtctgtctcccataccaggctgtaatttttttttttttttttttgagatgaagtctcccaggcttgagtgctatggcgcaatcttgactcactgcaacctccgcctcctgggttcaagcaattctcctaccgcagcctcctgaatagctgggactacaggtgcacgtcaccacgcctggcaaatttttgtattttttaaaagtagagatggggcttctccatattggccaggctggtcttgaactcctgacctcatgatccacccaactcggcctcccaaagtgctgggattacaggtgtgagccactgtgcctggctgctaggctacaaattctgaggacaggaaccacatctgtaccaggaaaaagtaggccttcaataaatactattgagtgaatattttaatgaacaaagaataattaaaggaatgaaattttaaaatatgaaaatattaacaataaaaacaaagcagaaggcattggaaaaaaagatttttgtgaaggaaataggagatggatgaaagaaattgcttcagaagataacgtttaaaatagacgggaactgtgttccaggtaccgcactagatgctttacattggttatctcttaatgttaagaattaagtaattctcaaaggcaatggccaaatagctaacttttgcaactccagatccactctccctattgttttccactgtgtagtacagaatttaaccttcccccagatgggatctggcctttgtccttggcttctgatgggtaatctctaggcccccgaaatgtcaggagtgtctgattgcctggaggccttgggtcatgctagagagtctaccaatatgaattacggtagggcctggtcacattagtaaaaccaataattcaatttaatgtaagsgttttgggttacatggtatcagtcaacctagagactgagatcaaccacagaggcaatccatcatgtctatgattgtatatggagcctcagtacaaactgtgaaccccaagacctagrtaagctcccctgctcagcagtactctatccatattgtcatacatttattctaggaaaggaatgtgtcctgattccacagggaaagacaatggaaacttcatgtctggtactttcctggacctgctctatgtgcttctttcactggctgattttagtttgtatcctttccctatcataaaccacaaccatgagtatagcagctttcagtaagttatgtgagtccctcaagcaaattatcaaattggaatatagttatgggaacctctactcagatgaaatcagtatcaaaggagagatcagtgttgggaactgttctctctaactttgtagttggcttaaactctcatatctaccacagtctctgacctgggaagctgacctatatggatgacataaataggcgtaacctctgccttaagtttgggtgggaccaatgcggagcccagataaaggctagaggcagacgggagggagaacctagcatttacgaatgtgcttctcccccagtggaactgccttagattggctgtgtcattttttgataccaagtcactgctccttcccttctccctttggaaaagcacatttgtaattagattagttcctttaaaaataaatatttctcaacttctcctaatctgagtggactatttattttactgttcgtaaggtcaccaatacagaaaagcactatttcgtaggaaaactgatgctcaaagagactatgaggaaaaagaaaaaaaagacttgtttaaagttacatggttaagaggtggtaaaagtgacattcaaacccaagtttgtctaatggccaagtatatgctctttccattaccttaggccaaagaaaaattgacaaaggagataaagaacagcaagagaaatagggaatgaaccaggaatatgcatggtcatagtctctaacagataagagaatcgcagcaagagattaaggatgtggggagaagtatgaaagatataaaatccttcaaagaagacttaacgcttagtaatccttcaattaaaccagtgtgctaccaggatatttgaagtgtgaagcattaaatataaaaaagaaaaataaataaataaaatcataaaccattwtgcactgtagatcaattaacagtggtaaagaagagtatatgtatatgtgtatcagcaaatgtatacacactcacctacatacatacatacatcaagagaccacagagaatacagactaagagaaggaaagagtgtgagaagacagatggctaaatttattttgtgtatcactagtaattttgcaaaaatatttgtgactgatgggcagcatttttcattgtgagaaataaatatttcataataaactttgacagagaaaaatatattttgtatagaataatttctcacagttccagactgatataaattaatatgtaaaaccaccaagaaacaagtgattggtcttcatattttcatgaaaacaatatgcagcttaaacttgtcattttatgaatattttgcaaaacagtactgcttcacagttctgtgggggaagtgagaaaaagctcaagatgtagggtttaaaatttagcaaacattcttcaatcaaacaaaagaaatgctttcaaggaagaatatcaagtaataaattacaatcattccaagtacttattgtttttattatttataatagcacaagtatcagcttttagcaacagagcaacctctcagtgatatcgtaagccaattaaaaagcctccttcaatttccaactaaaatgtaaatacagaaaatagcaacattaatagaccctgtctagtctctgaactttaaacttcccagaacaaaccatgagatcattctaataattttagaaatgacatgtcagaagcctaactcaaatcccatttgttgttctgtccactaagttagtgggctatcagggatgataaccaatacaataaagtaatgattgccaacacaataaagtaatagttctttgagagagtcgctttttactcagcactcagtctccttagctatgcacatggataacttctggtaatgtagaatggacactatattgagccaagaggcttgcttggtaaatgattccttttgcaacttaagcaaataacttcattattttattttgtaatgttcccatctttaaattgagggtacgagactaggtctattaaagcaaacagattccttcctttgtaccaacttgttttactggtgatgactgctgggcatgaagaaggatgctttgtgctcagtgagaaggaccactttgatcaattagcaatgacttccatgggcaagctgcagtagaaatgttgtttatctgacatatctgggctagatgattgttagctgccctttgaactcaaacatttggtaaaatgaggaatagtaatgaactaatctataacaataggacataaagagaactgaaactgagtgagtttttaatccatcaaattagaaacttacagtgggtactacctagggtctttgaaaagtaaaacgttctgtttctaggtaaaaaatattttaatatatttctttactgctatttagagattattataatgaagactgattactataatgacaaatgtttagtagcatttggattccaaacacatagatatacatgtagatacacaaagcaatgagtgtccgagactctctgcagtattgctcataatactgctcacccagttaccatttagggctcacatgaggaggcgagatggggtgatctggaactggtctccttcctggagagaaagctaaggtagaatgacagctacacaaatcatacaaaaaaattgacccccaggatctcattagatctttccagagtatgctattgaacaagtttccagggccaaagacaggacaatgttccactaaaaagttattctactatttgcaaacatatcatgaaagaaaccacattttagccttgggtaccggcatccctaaagtttcacatccagggtgccctccttcaaagacagtccatatataacataagaaaggtgataaatattatccagaacctcacaacacagatttacaggttggaaggaaaacagtttttagctaaagtagttcacatttttgtgaggaatgtaggactagatgtaaattgatagtgaaaaaaaaatatgtaaagcgtaaagtataaagtccaaagaatctttgaataatgaaaagaaagttataaattcaattggaaaaaatactgagcaccacaaaactacaaagggttgcaggcttcacctcacaaggcagcctttgcatctgaaaatatcagcagtctaacatgctgcaaaacattccacaacgtttaaagtagcatactgtatggctgcactgcttctgtcatggcaaatgatgattagtgttcagtccacgaattctattaatggtatacagagaaaaaattacagagaaagacaacagctagaaaaaacttattttttttttggttaaataaaaatgttatctgtctagaaaggaacttatgattggatatttttgactaagaaaataaggaagattgataaaaacttagagtaagttgtttttgcaaaagagactttataagtttgccaaattgagcctcatccaagaaatactaattgagtttaaaaggattttccctagtgagttgaaatcactaatacactgagaaactccagaatgctctgctgcaccatagtggccatatttggacaatatgtaaggcaccttggacagcaggtgtagtatatgatattttaactgaaccttagatactttaaaatacaacaaacctacacttcttaaatataagtagacacatcttcaagttgtagttaggtaatttcaaagattatctatttgatattttccttggtactattattaattcaagtctctcacttaaatttcggatcaggagaaaaatcatgactttaaaaacatttgtactttttaaataacatgatgttatatattactaaaagtttatagcttgtaaagaacttatataaatcaataacaaaaagacagataacccactttaaaaatgggtaaaggacttgaacagacatttattgaaagaagataaataaatggccaacaagtacatgaaaaaaattttcaacataattagtcattagagaaatgcaaatcaaaactatcagatgttacttcacacacactaaaattataagaatttttaaatccccacacatacaaaaacaaaaaataaagactactggtaagaaagtggagaagaaatgtaaccctcatacatagctggtgggaatgtaaactggtgcagccaatttggaaaacagtttgatgatgcttcaaaaaggtaaacataggattaccatataagccagtaattccattcctaggtacgtataccctgaaactaaaaatacgtactcaagcaaatacatgcacatgaatgttcatagccgcactatttataatagtcagaacatgaaaaaaagaaacaaatatctgtcgatggataaatggagaaacaaaatgttatatatacataatacaatattattcagccataagaagaagtactgattcatgctacaatgtggatgtatctcaaaaacattatactaagtgaaaraatccagacataatgggtcacatataattccaactatatgaaatttctagaataggtaaattcacagagacaaaaagcagatgggtagttgccaagagcaaggggaaagggagaacaggaaataactgcttaatgggtacagtttttttttggtgtggtgaaaacactttgtaacttgatataggtggtggttgtacaacactgtcaatgcattaaatgccagcaaatttatgcattgtacatttataaatgattacttttatgttatgtgaatttcacttcaattttttttaagttaatacaaattttcataaagttcccaagactgctgatgataccatccactaaaaaaatgaggggtcatgacaaatgagtgaaaatgttaaaaggaaatattacccaccagccaaatatagggcaatttaagaatcacaataaataatgatactaatagcttacaactcattgttgggaaaaaaaatccattagtccttactggcactaaacaagaagggagaagagaaagctcttccttacaacggaatggaattccaactagtaaatacaaaaggaatgacagagttagaaacaatcattttacaacatcataatagtacttgattcaggcaagaatcattggtgactgcaaaactatttcataaaagttgatgaggaatataatatgtatacaaaatacttaataccagaaaaagttcaccctacagtggagaaacctggcagatactatgtttgctaaagagatcacagttgatgtcaccgaatctggggcaaactggtatcttgtgccttttgatatgatgaacttaatgcagtgtaaactgcattactctcaaaatgtgtaacctcaatccatgcatgaggaaatatcagaaaaacccaaaaataaaagacattccacaaaactcaaaaaaaaaaaagtcagcatgacaaaagacaaataaaagctgaaaactttcagataaaaccagtctaggctgggtgcagtggctcacaccataatcccagcactttgggaggccgaggcaggcggatcacgaggtcaggagattgagaccaccctgattaacacagtgaaatcccatctctactaaaaatacaaaaaatcagccgggcgaggtggtaggcatctgtagtctcagctactcgggaggctgaggcaggagaatagygtgaacccaggaggcggagcagcggagcttgcagcgagccaagattgcaccactrcattccagcctgggtgacagagcaagactgtctccaaaaaaaaaaaaaaaaaggagtctaaagagacatgacatctgacagtaatgcatgatcctggattagatcattggtaaaggcaaagacatggctataaggaacattctaggaataactggtgaaatttgaatatggaatatatattagataatagcactgtactgatgttaaatatactgaatttgataattgtactgtggttatgtaagagaaaaacttctagaaaggatktcgggttaaagggtcattatatctgcaatgcactttcaaataagtcaacaaaaatgatggtcataaaaatgacaatgagtgtatatatacacataaacacactcatatacagccatatcgctatatgtgtgtggtgggggagacagagagaggaggagagagagcaagaatgagagtgggtgtgasagacagagaaagtgcataaakgtaccaaaatgttataaattgctgaatatttgggggttcattgtgctattcttgcatattttttacaagtttaaattttttccaaaattgaaagttaaaaatttaaaaagtagtatccctgagatagtttttttcattcaagcctgcatgcttgtacagatctgagactatgttctcagccatattctctcttcctggccattttcctcttagaaacatggcaaacagaaatgagaaatcccatttgcttaacaagtctacctgcttgccagtgccagattattccctgtggcatcatttttacttcaactttgagtacatttttaggagtctcaaatgtgtgggattccatttcccttgagaggcatcttctgttaactctcttttcctgaaatagagatcacccttaaatgtttccttagttgtgttaccaattatgtagcagaactctgccactcaggaagatactacttatttctaatggtctgtacactaatgttctttaattattaacctttgtctttgttgtagggaaatttgagaaatgttgtatttgggataaattgttgcatataagtatgcatgtgttattggtcagtcttctgttcctctctatcccttggtctgtccacagaacccaggacaatgtccaagctctaatatctgaccattcaaatggaaatcacttctgcatagataacacttgctggactctgctttgttacccagtaattttgactattgaactacatgctcacaaaacatcaaagctggaagggacaccagagacaaccaggtttataccctcattttacaaataaataaggtccagacaggttaaatgacctacccaaactaatacgttaaattgaagtcagagcaaaaataagaaacctagtttattcacttcctgacctgactgtcatctttccacctacaatgatgactcatcgactgtcatttagctgattatcactttgtgtttgagagaatttatagaatactaatttrcttttcataaacaccacacttgcaataaacttttaaagcaagatttatttctagcaatgctgaaaaagccttctttcttaaggttcggagcaaaacccagttaatcttggtcctatgtaaaatacatgggcacatgatgcatatctttagtcttctcatttttggacatatttctgcctaaatacttgtttctctgccaactaactagaattctctgaacaatatttagatcactttggaaaagggaagttggctcacagagttttcatctacacagacacagctggaaaccaaaattctaatgttcttcctaatggggcttgatcacaatagaaaagggtgacagagtctcaatttttcttcaaatgcctttttaacttccacattccaatacctgtttttcctttcatttctggttttggccaagattgcaatcacgtatttggttttagcaataaggatagttttgcagtacttttggctacgatcaaaaaacagaaatgcggaaaatatcaagagaaaatctatttgtacatagaatctttaagaacaaagaaatttgagagactttggcaacgtgcaagtgactgataagaaccattcaacacaatgacagagatcaaaggctaatcagcgtggacggaaaagatcatgggaagcaagaaagtggagagaagggctaggaggcaatggggttcaagaactgtgattgtaatgggagcaaaaaaatttggctgttatattttaaatagcttgttttcagacttttttttttttttttttttttttttttgagatggaatctctctctgtcacccaggctggagtacagtggcacaatctcaggtcactgcaacctccacctcccgggttcaagtgattctcctgtctcagcctcctgagtagctgggaccacaggcatgcacaaccatgcactgctaattttttgtgtttttagtagagatggggtttcaccatgttggccaggctggtctcgaactcctgaactcaactgatccaaccgccttggcctcccaaagtactgggattacaggtgtgagccactgcacccgaccttgtttacagacacttaaaagttttatttatatctatcataaatgaatattagtagttgcctaatctgatagtgaatattctgttttcataatactcgaaattgcaggaacatttagaacagtccctcctttcttcttgagaatgttttttctctgagcctccataacactaggctcttctggctttctttttgctggttgctctttctcactgtcctctgctggctcttccatctttatttcacattagataatagagtgcccgaggtcagactctcaggacttcttgtctctgtgtacactttttccccacgttgtcgcatctaaagatagacatgctgatgacttctaaatttacaccttaaactccgatctctcctctgagctccatgcttttatattttaaatttgatgtgtccattatttcgctaaaaggtagcccaggcttaactcactattctgaactattagaaaaaaacataatgttttacttttgtttacagccaatttaattgttcacctctcccttccacttgccagctaccagaaaatcaaatgaactaaatttcttatctagttaaaatttggtctagtctaatagtttcatagatccttccaataatacttcatttctctctaggaaaaaaaagtttggttcttcaaatagcccccctcatgatattggtggggaggagtccattggccttcatgatgatcctgtatgtgtgctagctctttgctactcaaagtgtgatctgtggaccagcaccaccaatgtctcctggcaggctgttggagatgcaggctaaactccagccctactgaatcagaatctgcattttaacaaaatccttaggtgattcataagtctgagaagcactgaagatctgatatctattcaatgtgcccctgagtactacttgcactgctgacattgaaagctgtgatctatggttggtaacatttttgtggaggtttggatggttgattgccttaatgtggggattttttgttttttggccccattggtttgctgagagcctgatagttctttgtagctgaatcagcctcacctcagcctccactggcagcaacctcctgaatgactcatttgtcttccattcagtctgtagctcaggaatcagcccagcctctgctgttgggaccctttgtccattagccttctgtctctcaacccagcatctgtggttcagaaaagctaaatcatagggaatccctctgtccacataatagtgtggtcaatttgctgtggcacagtataaaagtgatgggagaacaaagaggtgatattttaccagagatgggggcaatgatgttattgtttacttaatgcacctacccatctccaagctaaagccacaagggtacgtcagaatacacctctctaactaccttactctcatctctctcctctcttttctccctaaaaatcctcagggcaaaataaaaggcttttactttccttctactatattttatttttcttctttctgactctagctagacctcaatagtgaatgaggtctctcctccaactagggaaaaattgcatgagctgagtctcaggctcaggtggaatcaggaaaatcttatctcaagatgaaagsctggcttgctgtatttggtgcagaaattcacaacctaaggcctttgtattagttgtttcttctgctggttgcatagttatatttttgcaaaacaaagctgcatcttatactgactacttcttggaatttcttgtwacaaatctgaatctcccttcagggaaataaatgactagggctgatgagggcaaagttttttgtttggttggtttttttgttttacatggttaagcaacagataaaagcattttaagcattttaaaacattacccttacattacatgagaaagacagaattctgtttggggatgagggcaacttgctcttctctcggaatcccgcctctcactttatagcaccattatccacatagcagcaccactgtctactatgatgtagaagtctgacttaaatcctcttttgtcatatcccttatacacaatccattaacagtctttataggtctgggtttaaaatatctctggaatactatcatctctcaacatctcttcagctatcagggaagtccagtattcagcatctgttgctccccttaactcctacctgcctctaaccaattctccatgtagcagcctagtgagttttgaaacagtgagtacaaattttaagtgtactaatatctccaccctacttaaaattgtctaatggctgcccattacaattaaaatataattcctttccatggttcgcaagactataggagatctcatccctggtcaccattcaggcctcgcgtcctaacacttcctctttgttcattactcatgcacactggcctttttctgtccctaggatatgccaaggacctttgtgcacactgttcttctgcccgttatactttgcctttgtttcttggcctgactcttctttcaacattcatgtctgtgctcaaatgttaccttctaaggctgaacctctttaatactgcatgttaataatccctctttgttattcactataatattactttgttttaattttttaatggtatttactaatgtctggaatcattatttacttgcacgtttatcgttgcctatttatcgtctacctcttacatcaccccaagtaacatttctgaaaacagtgactttatttttcacctttatatcccaagcatctaggacaaaacctggacagttgttcaaatatatttcctgaaggaatgaatgaaaaaataaatgctggcaagggcatgatagaaatgagactcatacttgctgtgtgaacttggtatgcgctttcaggaaagcaatcygtataatatatcaggagtcttggaatgcctcaatcttttggtctagaatgtcacttaaagcaatccggtccactgattattgctactgcattatctgcattattcacaatatagaacatttttaaaaattaggaaacaaacgtccaatatttggagaatggagtatctatatagtattaatatgggcactaaaataataaagattatttttatgacataatttttaaaatatggaatattttctactatgcaagggcaaaaaaatgtaccaaagtataccaaagtggtatatacaatatatcctttgatgtgcaaatgctttcttccccatttctttatcctttttgagttttcaaaattttttacaataaagctgtggtattttttatttttatttatttatttatttatttatttaagatggaatcttgctctgtcacccagcctgaagtgcaatggcacgatctcagctcactgcaacctccacctaccaggtttcagtgattctcctgcctcagcctctgggtagctgggactgcaggcatgcgccaccacacatggctaattcttctatttttagtagagacggggtttcaccatgttggccaggctggtctcgaactcctgacctgaggtgatccacctgccttgacctcccaaagtgctgggattacattgtggtattttttaaataaacattttaaaagccaacattaatttagttaaataacatagaaggaatcaaaatcaatacatgtttcattgaattaaatatgacattaatttttttctttttttttttttgagacggagtctcgctctgtcgcccaggctggagtgcagtggcgggatctcggctcactgcaagctccgcctcccgggttcacgccattctcctgcctcagcctcccaagtagctgggactacaggcgcccgccactacgcccggctaatttttttgtatttttagtagagacggggtttcaccgttttagccgggatggtctcgatctcctgacctcgtgatccacccacctcggcctcccaaagtgctgggattacaggcgtgagccaccgygcccggcctaatttttttctaaattcactaaatctaatactatacaaattggcatttacttatatttaagttcactatattttaatcattcttagaattttatctaccctaggaagacaagttttgacctgggccttaagacaatgtcccaaatcgcacatgaggtactgcataattcaaagcacatgtgtgcttgcatatgcatagtaaagaccataacatttttaaattagtaaatgagctcctaactttatgattatacatatatactgataatttggataataactaaagtctccatttgtcttcaaattataatctcctatggtttgaatgtgtccccaaacttcatgtgttgaaagcttgatccccaaattcatatactgatggcacttggaggtggggccttttggaggaaatttggtttagataaagtcattagagctgagctcccataatgagactggtagctttataagaagagaaagagagacctgagcaggcatgctcttgctcttttaccatgtgatgccctctgccatgtgtgatgtcataaggtccttattagatgcagccccttaccttgaacttcgcagcctccagaactacaaaaaaaaaaagtcatttctttataaattacccagtctatggtattctgttacagcaacagaaaatggactaagacacaattcctttgttctatgaacaaatttaagtcttctaaacagtacttacttctccaaacaaaatgatgcttggtgttaattgaaatgtaggactgttacagtggactgcagatcttattgctgcaggcagaaacagaattataatgaatatctcatgttctgtggtacttggaggcattttgaaaactcttccattaagagaataaaatacaaacataaccactgtacttgaaacaaaacaagggctgttagatttgactcaatcctttcaatgcaattttatccaatatatatatgtaaacatacacacacacacgtatatacttatatacacatgtatattcttatatacataaatatatgtatattcttatatacatgtgtgtattatatattatgtgtgtataatatataawgtgtgtataatatatattacatatgtgtgtatgtatacacacagaatatttcaaaaaagattataagtgattgaaaggacatggaaaaattagactttttagctaattgtctaagacagttaaacatttgctgtttccatcattctacactcaattaagccaggctaaggatcatcttataaatgctgactttgttgtatttttctcatatcaaacaattcagttcaatctcctcttactraatgcttactatacgctaggcattgtgctgaggaccaggaatacaaagatgcagacatcctgttcactgccaaattttgacaagggaccaaatatatatccattttacaaacagaaacttcatagtaagtttcagtattagaattttcttgtcagcagccatgatatctaaactgctaaatatataccctaagtaaatattctataagcacatcagatcagaaacagctggcagcttcaggctgttcatttcaaaatgaattgaagacctgtaatcagactagtgaggatattattgataggataagtatttgtgtactttcacatgaataaactttcttctttcatgctttcaaatttagggcctttttagtggtgttgggatgccccattaaatgctagaaaactatttagtttatccttagtcaattctactgaatttggcacctcttaaatttggttgaggaagaaatctgcaaaagacaattacwtgaaatatatgtttattaaaaatgcgagactgccaatatatttaaggaaaaaagaaaatgtaaaaacaaacaaacaaaagactttcttctgacaatgctgtgttagtgtttcacatttataattttttagtattaatctgtaagaatccatgaaagaaataaacttgtacttgcttattgtgcctgtttctagattttagacatgctagcacctctttgtaacagtggtcttccaaagagagacttgaccaacctgtgcacagagggagtgtccttagtgcagtgctaaagctctgggctatgagtccaaagatctcattcattcatagactcttttgcaggcaagacactaactgctatgacagtcagcaaaaagtaaaacaacaagtaatctatacatatttattaatttctgcatttgtggattaactgtgttgatacatctctcgtttgctgaaaggattaaagtagctcaacacagaggtaagaatgacttcctccygtgactttctatatgggtgtagaggtggcaacctctgactaggtgtctgcatagcaaattgtatacttttaaaataacgtcattgaccatatcaaaaacagggagagggatgataaagaatatactgtaatgaaagtcccgcaaaccctactttccagagtgaggaagaaagaatgattgcctgatattttaagtaggagctgctttctttgctgtaggttggcagaagctggagagtggagcaggagtctcctagaagcagtgttttctcactccaaatctgagttggatgctcattaatgagcaccaagcaccagtttgcagtagccattctgaatttaacagtaaccatttggaggctacaaatcctgaggtctgactctgaacatgtgtttgtttattggcacagggatagcactacaccatttagttataaagtacaacggaacaaatctacattaatatgagaatccatattttgtcctgctttttctatatgtcacacttctcagtgagaccctaacaagagcaggaattaagaataggtcagaagaacatctgcttttcttattttgattacgtgggcaagcaaaggaatttgcttttataacaccaaaataacttggaatgcggcaaaaataaacgcaccttctgtctcatggaatgttattacagtacaacrctttgtgaatgcttgttggcattttcaagcattttttgttctcctcatttctttctcagctccataatgcaatcctcatggtttgagcactagacttcaaatgagacatctattcagagagtgttcagacaaaacgagtggtttccttagtaatgggaactatgtgaaagccttcagcacagccccttcagacagccaggcttctcccaggcttgtggttcacacataggctctcagtgagcattatacagctggggagcacccccaaagtctaaactgaccaaagcactgaatattcattgcatttctaatcaaatgtaccctttataaaaggttaaagatgtaagaagtgctcttaatggcgagggttaatttgctcattttctgcatcatgtctatggaatggaaagaaagataagcgattttgccaaaaaaaaaaaaaaaaaaatgacacgtgttgctcttttgtttgattgtattttacatttccttaccttaaaaacctaagcctgtcctattcttgttccttctatgcctaaagactactactctgattttccagttttctgcataacaatcatcttcaataaagctttgaaactctgctattaaaacagggtgcaaatgttgccttttgtagtctcaaatatatttaaaatatagtaaagtagtttcatgtataccaatgttgaagttttatgtatgtgtatcgatccattttgttatttagtttcaggacgacacaataattagaaaaagagctggataatacaattgtcattcatcttaaatattgactcttaaaggcagacaaataacaacaactatccaaaataaaaaccaacatgaaaataataaaaaattatctcagctgatataatgtttgcctttgaggaataatgatttatagataccttcacactatgttaatcatccaattaggagaataaaaatattgtcaaacattttggggttgaaaaacatgaggtatagctaaattgttagtcttctaccatgaatattttttgtcaatctggttacacataagcaaacacaggaagcaaaagttaagctataaaacccgcaaaggagaggagaacgagggcctcaaaagatcactgaagagaagaaaatacagttttaagactgttggctttgaagcctgacttgcattctagctttccttcttcactagcgtgacaactgtagaagttcaccaaccccagtttcctcttctgtgaaaaggggaaagtccctgactgcctcacggtactgtaagaatgaaaccatatgtgtgcagggtctaccaagtttcagtgtcttgcatcgagttaaactcaacaaatgctatttaatattattctaggtactttaatttcagcatacataatttctgcatgtgtacagctatgcatattttaaaatctgatctatttcattgtggtttgtggatagctcaaggaaaatcatttctattttctgaataataccaataataaatataacaacaaaaatactaaatttgctgtcaagaaataattgaactgaggaatgaagagtgaacagtaagaagtaggcttgctaaacacaagtgtgagcctgactgtgttgtggaggaagggaagaatggactagaaggtatgagattggaagcaagaaagatgaactagaaaagatgagactggaagcagggaagttaggagaaattgcagcagccaaggtaagagacgatgaatatctagcagacagagaagataatttaagaaaacttcagagtaaaatcaagttgtatatggtgaaatgcaagatatgaggcacaagatccaaagttcctgtaattctctaggtaacgaggcagcagcagaaataaaattaaaaaaaaaaaaaaaaaagaaaggaaaaaagaagaaagccagtttaggggagcgcttaagaggtcagctttagacacgtagagtacagagtgcctggggatcacgcaagtagagacatttaccagacaattggagggaaggattgataggtagaaagatagatagacggatggatggatggatgcacggataaagagactgattaattttacttgcaagagcactgatataggtttgaaagtagtaattacatagtagtagagacaatattatctaagagagcatataaagaacagtaggcaaaagaacaagcctaggataaatacttaagaggtagatgaacccacaatgacaagagacagaatgtgcagacaagcatgaagatgacttaggaggctttgatgtgcaataaccaaattgggagggcactggttgagattccaaagcagaatttcagtaacaagtttggattagaaatcagagaaaagtcaactgacaaagtaggtagaaagtgatgatrtgattgtagcaaatattgatagctcttctgagaaacttaatgtgaggagaacagagaaggaaagatagatgagggttcaggattaaagggatgattgttgttattatagtatgagtaacaagtaaatgtatggattttgtggaaatattgctagatattgtttcacatcgctagaaaaggagtaaaagtcaatcccctgagtgaaaagaatggagagagacatagagaaaagccaagatgagagacctttttggatctacagagaaatataaggagaaacatagggaagaataaaggaatctgaggaagagacagagaaaaaaatttgtctcattgattcctgacatgtcatccttgattgtgaatttcttggcatagtgagattacttttgttcttcaaatgattcgtatctttcattaaaagtaagacctttgggtatatacacagtaatgggattgctgagtcaaatggtatttctgcctttaggtctttgtggaatcactgtcttccaaagcagttgaactaatttacactcccaacaacagtgtaaaagtgttcctttttctccacaacctcgtcagtagattgaagctagttgattaggatatttagctgttaactaaatttttgtgggtttgcgtcccattaatctagtaaggactcagtaaggtgttttttgacttttttaatagtagccattctgactgatgtgggatggtaccacattgtggtttctatttccatttctgtaatgaccagtgatgctgagctatttttcacatgattgttggctgcacatatttctttttttgagaagtgtctgttcatatcctttgaccgctttttataaagacacatgcacatgtatgttcactgcagcactattcacaacagcaaagatatgaaaccaacctaaatgcccatcagtgatagactggataaagaaaatgtggtacataaacaccaaggaatactatgcagccattaaaaaagaacaagatcatgtctgttgcagggacatggatgcagctggaggctaccatccttagcaaactaatgcaggaacagaaaaccaaataccacatgttctcacttataagtgggggctaagtgatgaaaaatcaacagccactggtgcctcctggagggttaagagtgggaggagggggargatcagaaaaaacaactaatggctactagggttaatatgtgagtgatgaaataacatgcacaaaaccccgccccatgmcccatgtttacctttgtaacaaacctgcacatatacccctgaacttaaaataaaagtatttaaaaaaaagacgtggactggtactgtggctcatgtctgtaatcccagccatttggaaggccgaggtggaaggttcgcttgagagcaggctgggcagcatagagagaccccatctctactcaaagaaaaaaaaaagaaaaaaaaaaaagaaaaagaaaaatcagcaggatatggtggcttgtgcctgtggtcctagctactctggaagctgaggtaggaggaacatttgagcccaggatttcgaggttattgcagtgaactatgatcatgccattgcacgccagcctgggcaacagagcaaaaactgtctcaaaaataaagaaaaaaaaawtaaaattaaaacaaaacctataggtaaataagaacctctgtttttctccaattctactttccaaaactcctttgaaaaagaaaatgagaactctgacccaacttgctttagttcaacattctaacaaacagtcagtagtactactactcaccttacatcatgtttctaactgaattgagaactaatctgttattagaattagaccacaaaggacaaagtcattgaagaccttcctagcacaatgtcagcccctcaccatcagtgactcattcatatgtatttagctttctgagcatatcgactcattttttccactaggcactgcatttcttcagagctctacttctcaaatcatgacagcaataaaaattccgtcatcaaacctgaacaaccactactgtataaaagcaaccactgtcttgtgcataaaactaattcctttttaaaaatagtattttatttttggcatcccttgttgctgactatattgcattggttggctcagccatccatcaarcattcatttattttacaagtgaatattgagtaccttgtgcagtagaaagagctttggctctgtaagcagacagaactgagttcaaattttagcctcattatttaatagttttgggacattgggcaagtaagctagcttctttcagccaatgtttctacactgccaattgaaggtaaaaatatctatctttgccgggcgcggtggctcacgcctgtaatctcagcactttgggaggctgtggcgggctgatcacgaggtcaggagatcgagaccatcatggataacatggtgaaaccccatgtctactaaaaatacaaaaaatttgcagggcatggtggcacgcgcctatagtcccagctaccagggaggctgaggcaggagaatcacttgaacccggaaggtgttggttgcagtgagccgagatcgtgccactgcactccagcttgggcaacagagcaagactccatcttaaaaaaagaaaaaaaaaaaaaaacaacgaaacactagaayagctataattcaactggaataggtataatttatatatcaatcccaatttgaatagaatatttttgaagttaatatatataaaatatacaaatatatgttagtgctcgacagatgttattttatccattttatatgcmttgtggagcttaaaaacttaacaagacatatactccctctaggagaatcttatatgctaaaaggggaaacaggtaaaattacagaaacaattataataccaaaaaaatggtaagtaataagagcgataaagagtgctattgtgggtcaaatgagagattatatcttgttaaaggaggaaaacaatgaccatgataacaatgaccactaccataataatgccagtaataatgtcaaacatttgttcaagactactatatttcagcacttttctaaacccggtatacatattaactgttttaatgttcataacaattctaggagaaaaatgacatgcagagataatacttttaaaccaagatgcacgatgatacttaacagagatgatacttaacatgatgctcagagtctctaggaagtggcaaggtaaggattcaaacccagacattgtggctctaaaacccacattctaccgactgtccaggctacttttctaagaaaagcacacaggcgaataaagcccaggatttgatgaaatagcaataaacaagttaaaaatcccaaccactaagtcagtgaatatctactgtacccaatattttcttatttgatgatgaaggcaaaactctttcagtataatttaagggttgtaattattcatttacattttaaaaccatttcaatacatttccattaaaactcagtattcatctaggaaaccctgtagacatttcctacaatgtaggtaacatgtacaaccatgtaatactgtggtttacaatgtgaaatttctctgaagctttagtgccttctaaaggaagaaacttaaaaaaaaatgaagggagagaaggagggagagtaagaagaaggaagaaaagaaggagaagaaggaaaagaagaattagcagagacctgtcaatcatccagtagatgatagggtaatatggtggaaaaaacctggaatacctgaggggctctatcctggctttaatgtgccaactgtgtgctaagattccatggttctcatttgatgatcactcacaattgtattaattcaaaaaccctaaaatccttactgtattacaatgtaacgtcttcatatggtacttcattatatagatgtgataccaaaataattttttcatgtatctttggagagagccacatttcatatttacagttaaggactgaacgccctgataagtgaaaaaacacccaaaacacacactgattccataaagctgctgatgctcttggaacaagatagaaattccagtcaaagaacagaatcgccatccttttcatccaaagccagagtcattttctctttcacattaaaatctcatttctagtgctccatgatattaaatttataaaaatgagtataaaatattttaaatttatcatgtacctacattaaaaggacaattgcaggaagagcactctgatctcccactttcaaaagagtgatcatttagttaaaacaacttcctatgaaataatgtaagataacatataaatggctacctttaacaattctaactgaatcaaaactgaaaagattttttcttgatttctgaaacagactgaaatttaagatattaggtatgactgcagtttcatttaaaaaccaagagaggagtttaatcatgtatctgactatcacaacttaccttcattatgggagtgcattataattggtttgattactggacttgtcaattatacagtcaataccaatcaatgaaaattaatcacttaagataccatggcataaataaaaattctctttttacaaataattatcacaattttaagattattcttccatatgtggaaataaatcctgcagatactgaaataatttggaatattaaagaaactaagatttgctagattaaaattaaggggtaagaaggatgattattactattattaaaagtacattaaattatatgtaaatatactctaacacaacatcccaacactcaaccatgatccctaacatacagaactgactcagtgctttctgagtaaatactagagtatccagtaaataataaaaccttacaataatattctgaaataagtattaggttaaatgagatgctacttttatcttgaacttattttgattcatttgaataaattcttatagaaaaaaacatttgggaactgtttctagaaaactacagagtgaaaatattcagtatttaaagacaagcctactgtttaaaatttttcctggtattattattattataataactgcaaactattgttctatgtcatgtcaataagcacttaaggagcaattagatgtgaaggttttgttttttttttcctaagtaaatctaataagtgccatttctctttactccactagagggtagtctctcaaaactggggttggagtcatgactagcctgcttttgacctgttgatatattaatcctcatgttccattctcctcaacaagatgtttctctagtatactaattaaggttgtaaaacatgcatttttaaaactgctttttgatttttcatgtatgttctttcagaaatatgcactgctatgtgtttctgtgttttccaaatttctggtaattaataaaaatgttttacatgtatggcttatatagtatattttcctgggaaatatcctttcagagttaataggcctaagaataaagatagtcttttaaataatttaacttattacaatcgaaatatttccccagagtggtaaaaaatacatcctaaatacacacacacactcacagatacacaaacacacctacacatgtacccattcatatgtagctcctagatttattacatcatataaagagaagtcagtgagtataattagaaatacatatttttaaaaagtaccccctcaaatgccaatgttgtgaattacagagaggcaaatatatgctttattttaaaaatctggtcaatccagacaagaaatgtcattgctaaaaaaaaaaaaaaaaaagtgttattgaacaccaagcacatatgctaaattaagtaggatctatagagaaccaaatgccactcaaaacagttgcaagcttctcttcttaaataatgcagtcattgctgaacttcagagacggagttggaggtttgagtctctaccaggtgtttttaatatttaggaaatccttatcagtagtgtgtcctctctatttgcagactgaaaacatatttctctgaatgactgataacctaaaattgagaaaacttgtcaaaaattcccaacattccctcagaaaggaaaaaaaagaaggaaaatgatacctaggaaaacatgcaagcctgtttcatttatttgtatcctaagcagcagtgtcatagaacagacagtttgtttcagccaaccagactggagcagctgcgagtgctacatcttggctgtctgaagcgattggctcctctctggggagtggagggtgttcagttattaatgaccgctgagcaggcagcaccatgtcagtgtgacaactgatcgggtgaacgatgcaccactaaccaccatggaaacaaggaaaaataaagccagctcacaggatctctcttcactggattkagagcctcagcctgccgactgagaaaaagagttccaggaaaaagaaggaatcccggctgcagcctcctgccttcctttatattttaaaatagagagataagattgcgtgcatgtgtgcatatctatagtatatattttgtacactttgttacacagacacacaaatgcacctatttataccgggcaagaacacaaccatgtgattatctcaaccaaggaactgaggaatccagcacgcaaggacatcggaggtgggctagcactgaaactgcttttcaaggtaagtttaaaatacacatatattttaaaatacgttctatttcttgtctcttcgatgatcatgtttttacacctaaatcctcctttgatgtcttcttcttgtctgaattctaagagcatttttcttttattgcacttttgagaagaaattcacatgcaaaacccagctggctctgtgtgtgcctagctgtgtttgtgagattctccaacatgcattttactagcttgaatgcccattagaggatgtgagtgggagagaaaaagcagtgttggggggaggagaaaaaggagggagacagaagagaagggaacagtgggggagaagagaggaggagagggagagagaaggagatggggaagagagaagacagagaggagacagagaggagaggagagtcacgggtgatggggtgcaattttcctttttcttcacattatttgtagtgaaaagcagatcacacattattctctgttttgaaatcaacccaccaaatggggcatttttattttgtctcatccagtggatgcaaattaaggcaaatgctgttgtatgttaagagctaaaccactaagcagagtagcagaatgagcatatcacaaacagttattgaatttctgccaggctacatcttacggactggggtaaatgacttccctttaataacatcccctcgctggtctgaagggacagtgcaaatgtctgattgctaatgcagctggaactgccacacactaggtgaaaggatcccatgaaccagaagagttctaatctttggtaattaacaggatcacagcaggatggctttaaagtacatttcctatttaagaaaattgtttgttctaaccaactgctatattccctttgctgttgttgagctggatggcttaattcggctctaatttattcatttttaacaatatgtccttgtttctctgcctctaatttcagtgaaagcaggctatgaatatgagtagaaccgtcctaatttagtgaaaaggggawaatgtgaaaacaaaaatagaagtaaaggttcaaaatatctacctagaaaatagtgtgctctggtaccataaatattactgatatatttctcatctttagtttcagaagcaatgcctttgagacagaattactctcagtaaactctatgagcatccatgtattgatgattcatggaattcagtgtgggttaatttttacttccaatcttgtaaagggaagccagctacttagaatatgctttcaaacagacaacaccaattgaggatattcatggaaacattcactgccctctttactgggtcctggaaagacagtaaaagaaacctagcatttgtatttcatcttctggagctctctcctgccttcttttagttcaactaaccacacagttaacagagtcagcttctttgaaactgtgggttatttttttccacaactgtgatttcagagctattattggtttcctagtttgtaatataagccaaagcaaaaagacaataaccagccacttagatcctgccactttcccataaatgtgtcaaaaaaatgagtcagtttacaacatgtaatataagaagtcaattaattccagtgacctttgtaaatgatgacaataaagcagctctgacaatatgccagtggcttcgattttctctctgtaagatgaacaagtttaagaagagggttcctgctcagagaaaaatgaaaggtgctgaagcatcagcttgcaatattggcagctttgctcgctctgcctcaaatgccacatgcaatctataaaaaaaaccaaaatgatttattacaaaaaggaaaaagtgttttatttgcttttctgctatttattaaaagtgctgcttttgaaacagaccagatctgatattttgaggtacctcctaagttcctaaccaagaggaaaagacttgaagtagatactcaaccctctgatttcaaactcctatataatgtagcattgcagtatttaattcagtttttcttagaccttttccagggaaagtttgcatgccagacacacattcttaaatctaacccgccttattttaaaattgcaatagatgacacctaagaacagtggattcactctttaaccttagtaaagctcacatacatattttgtggattacagagatcagtaaygtgcccacttcagtctgagaaataccaacactccaggcccccggtgttgccactcagtgtgtgccagtgagtttggtgatttgatcagcacctacgaatgccagatgatggacatttgtgtatgactggaagatttacccatagtctccccaaatcatgtaactataccagaaatagcaccttcctggcaagacaattcaaaggaccatttttttcagggtgtcgcttgtcacaggcaacatgctgagttagaatgctgatgagtaggtggaattttttatttggaggtggtggttgttgttgttaatggcttaataaacggtgctaccagccttccaggccagcaatttagtgacctacaaaaaaggtgatcaacttatgatgcactaactatatttcactgtttctttgttctttccttttttgtaacatcttttgctttcgccatgtgatgggtttgatgtttcactcctccccccgaatctgaatttttttggggtgtaacattcctgtgtaacatggcactatggtatttattacaatctaagttgatcagaaagctctataaccggagtttcgttttaaaaaaacacttatgtaagttaaatgttattacttaattagcagcccctgaaaatgggcagaggtgaggtatctgttggtgaatctgaaggagatcattaaaagaaagctaatagyagactaaaaaatgagttcctacttctagcctcagtaaggatgctcctctaaaatgatttaaaataatgtggctccagccagtctgaagaaacactagacatgtgtacagcacactaaaatgttccatgtagacctggttctgagagtttagctacttatgtatcactctttggtacatgaaactaaataaagcaggtaaactctaggcaaaacatcagtacatcttgtcagtgctgtcaaagataaagctctctgatattggctatgcaatgagtacttaggaaagcttcactgtataacaactgaacatagctcctgcacagagctcagggaattcctctcctctccttctgataaagtgatgtattgttagacatctacgaagtcactagtaaaacatgataacaattatttctttagccacaatgtgaaaggaaaggaagtcaaattctaatataaagacagtagctggtgccagaggatgggaaaaaggaacagggataaatcggaacgtttttctaacttgttgaaaggaatggaaggtctcaatagatgctatttagaggtcattaaatacaggattaacaaggaagacttaatgtccatctcaaatctttctgaagaagtacagtacctacagggccatttactatatttgcataattgtcaagtttgtatacacctgcttgctattatgttaattcatctttaggccataataagggaagaattttctatggtgccattaataaaaacacatgacacagcttcaggagacggggaataaagaggggagacatgctttcatagaataaaatttttgaactgaaagagacattagtagctagtctaatatgttcatttgataggtgaaaaacactgaggctgaaagggtttgaaatcgttataatgtaatacattatactttgtattcacccagctatttattggagaggcctaggttagaaccccttacaatacttcctccagaattccattaaaattctgcctccttggtctttcaaaaataatgttttctcaaaaacctcctatgtgcaaaaaatccccccaaattcacagatatgtacaaaaaagagaaatatttattcagataatcaaatattctaaaaggaaaagccaatattcaataatagaagcaaygatttattaagtatataacacccaaatatttcaaacccataattcatcatttgaatatagtttaccatattctgtaaagtcataaaaattagagttttgccctgtttttaaaacatgttaataataatactgctatccttcacctacagagactcagctattgatcatccactataagttttaaggttttccaagaattctgaagaggctttccacatctgtttttacttggtttcactgtaaataatttaaggcacttaacatgtgccctttttttatatacagtgtccactctcaggatccatgctttgcttatacatctcactggaaaacaataaatatattatcaggacagcaatccctctccctctctccctcccctaccccatcccaacttactttttgatttctagagtcagactgagagctccagtaggcaatgatatctccttaatatcacaatcctattcttttcttttgggcaaatttctctgtttttaaatgtgctctccaaattttgcttaacataatagtaattaattgactcaacttgtaagaaggatacaaaatataaacacaataattgtgaatatttgtttaaagctctaccatttacagagcaatttttcaacaattactttgctcctcacaacaatctggtgaagtagggtagatatgatgatgattaacatctttaagacaggagaatgaggttctgtgaggttagagacttgctagcatgttgaggtgcaagggtctctgactccagagagtagaagaaaatatgggtgcagcactggtccctggcatttctgaagttagtaataaatgttagttccctttttatggaacttccactctagatcttacccttccaacaactatgtcctttgtaccataccacactatatctggatagattcttgcaaattaaaatctttatttcttaatttaaatcacagctattgctatgcctgagttaaatttaaaaaaaaaaaaaacaaaacaaaacccacaaccaacatctattcttggagaaaaagactgtatgttgtyctacctactcatccatatgtttgtctgacagcattagcactttgataaacagacacttggcaaaggtctcaaaaactggaaaaaatgagatgagtaaattatttagggattttccaggttactaaaaattatgaacaaagtctccaaagtcacttaagaacccccaatggatcaagtgtcaacataaaagcaacttccttagcatctcctttctggtttgtcttgggttgaaaatgacacactaaataagataaaaatactagttaatttgaaagtaaactggtatatttgtaaactactaaagtcaaaatgccagtaaacttacatacattattctgtgagccctttctaggggagattgtgtctgtcaaaagtaatatagaccttaaaatgaataaaaatccctttaaaaaatcttctaaagtttgtcatttcacgctttacttccaggaggtgaagcattccacagataatcagctactctattcagggaaggagtgtaaacatcaccactttytgcatgtttgcataaaaaaggcccactgaatcagttaaaggttagtatcaataggcaacattctctatttccaaaggcctgaagctcctgggatctaattccctgaggaacaatggaagaggcactgtttcccaactggtacaaaacaggacttcaggaacagcagaatgtgttctccagggattaagccccctaacgtgaagcttgggactcacaacacttacaagtgacatgaataatagtagatattttaactatagaagacatttaagagacttcgttttcactgtgataaacaggtttgatttggacttataacttttttctaaaattatcaaattaataacgactataatgaaatagaggcaaatattttagaggattcattccttggggtaacatttgttctataatttatagtctcataatgttgagagattaaagcatttaaataacattgtcaactaactttcagcttacctttcttaaggaaaaaaaacaaaaaaatgttaaaaatagacatgtatttttcaaacatacaattcatgtttttatgtcattagactgtttactgtatcgctatatttatatgcctctgaaatatggagtgttaatggggtctaartttaattctatttttatcaaaactcagtcactcagaaataccaaacactgaacatgttctacaaaaagtattcaacatctgtagaatacatggaaccacaatgacctttactgaaatttcaatagttgcaggaaataatttcaatatatatctacacagattatattttgatttctacaaaggccaaggggttaatgacyttaaactgcaggtgcccaaggcattgagaacaaaaaagatagagcaagcgaaaagagaattgtgtctaggtcacaatgctgtagcattgaaaagaaagtgcaacagaacagaatggaaagagcaaaacaaggtgactgccatatatgaaagataaacatactctaagaacatataaactttgaaagctctattcacagtcattcttgaatgaaaaatatataaaatgccattataagatataaacatcatccaagtcaatttgttgtgtgactagctgaactgactcacttaccaaacacatagtttatatttgttcctcttattgtcatttattactcacgtattttttacacaaacaccacagttgttkaaagagtttcataaggtgatgttcagctaactttttaaaatcagtgaggcattttccaaaccatttcctcaatcaattactttttaatgaggaagcaaaatttatgtaaatatcaaagtctcatttttatatttaggctataaattataccataatatgctgctgttgggcaaaataatcaaagtaatgatgaattaaaacaaatgttctgacataaattaatgtaagcagagcccttatacgttcaaaccacatcatctctcttagacaatcctttactggctaaaggaatggtaataatactggcagatctcatttacaacatacaagcattttctgtgccaaacattatgctaagcacttaacatacattttctcatttaatcttcataacgaccgtactaagtaagcgctatgtttaacccattttaccaacgtgaaaaataaggcttagagaagaaaagtaacttgccataactaatgaagaacacgaaaaggaacctaggttagttagctcgaaagaacaagcctttgtgcatgaggcaacactgcctcccgttggtactgcctaaatatagctagttgatatcgccttccaagagtcagattctctatcaaaatacagtaactctgtttctagtttcatatcatgcattctgctcatactagaatattatacctttgtaggattcttcttttctttctgagaaaggagtgatgctttaattatttatatctgagttttgctatccactagattaactaaaatgattttttgtagttcaattcacagctagacctgtgaactggcagcttataacttcctctatcatcatttttccatcgagtggaagtcaacatacttcttcacctgaggtcatgcagtataataagtgacacaaaagaaaaatgcaaaacttagctcattggtctcaaatttcattatttataataagctttccttgtatctagttccaaattttagacacttttttcccctcatgcattctcttttaaatgatgaagatgaaaatagtctgaatacaatttcattgctactatgagcatcaattttcaatgaaattcatcaatcttcttcagtatgaataagctgctagccctgcaaagttaattgatgaaagctgtaatttgcttttcaaactgaggatgctgagccaaacctaaaactttagtagaagcgttctatattagctgtttgtaaaacttcagcatttcttgctatgtcacctcctgaaagggctatcaggggagtccttcaacttgactgtcctacaaaacaaaatctgaatgtaaaattaaagcaaaaatgttgctgaggattcctccagtgattaaaaatggagtttagagagctcacatcaacatacattttctattcaaaatgaagttttttttttgaaagttataagcaattagacaactaaaaaaagaaattcaattttgaggtgataaaaggttaaagtattgtgaatcatgaataacctaacatgtaagaaataaagaaggacatgtataatttaaaattaaacttttggggtttttttcctgctacttcttacatacaacaaagacgaggaagaggaggagaaagagaaagaagaggaagatgttgggcaacatttatttaacatgctccacagcccggaccctgggtaagctctttgtacaactcacctcatttcactttgattccatgagggaactgaggcttgaaatggagaagcatttgcccaacttcactcattggaaaggtcctgatttgaaccctgaatgtctgactctgaagcccatgttatggtgtcttccttagcatgtatttcttttttttaaatttcaatagctttttgggaaacagatggtgtctggttacatgaataaattatttagaggtgatttctgagattttggtgcacccatcacccaagcagtgtacactgtacccaatgccttatcacatatttcttagaataagcataatatatttatccttagagaagcatttgactttttatgcagaagcatctaacaacaggctctttctacagttttaaacttctcagccaagatcaggagtatatatatataataatatgcttaaactttatatataataaaatatatgtaatgaaaatatatattaaaatatttataacatatayagayttaaaataaatacaataagtgcatcaaactttacagttttaccacatggtacaacctgattagtataatattatttaataaataatataatgataatgaacacttaatataattcaactaatctaaaagtattacttgtggattttctacttaaacattcttattaatctgttgaaaatgcatagagccaaaagataaaaatttaggctctggctgaactggattaaggtttttttgtttttgtaattttagaagtgtaatgtatgtaaaaatatcatggttgaattccaggaggatttatgaacatctaagatctttatcatttcttagggaatggaaatcagtaatgaaataaggaaagttttattgaccataaatatcttgcaaattgaacaagtagaacaatgttttaaccttattctttcagccctgaatgttgctcaccagttttgaaaatatttgaaaacttttaaatatctttctatattttgtaaagatgatgaacatttataagtttaaaattcccccataaagaatttttcctgtccagaatggtaactcctcctccttgatcaccacattctgcctccacacctgctagcagtatatcgaattctcaaccccatttaagcatggtgctttcttttcacatcatcatatttagtttttaagcaatctgctgctctggattttacttgatatagacttttatgtctttgaaagaagaaatattctaagataatatcttaccacttattcatttagacatttcatctcatggtcatttaatcaatgaccatgatatagatacatccctagtcattgaacagaaccttggcatactgataagcgataatgtctataagatacaacaagcagaatcatatattcgtgtctgtgatgatgtactaccaaactcacttgggtacttttaatgtatgatctcagaatctgtgagagtaacacctaagaatccatacttattttctgcacaaagttacagaattattgggttaagattcaagtctttttcytttgtccactgtctaccatttttgttgtagatttagtaaaaaaaaaaattacttgagacaatcgttcgaattaatacagaatatacataggtacaacaggtacaataggtatactgtcttgtatatttcctgtgaaatatacaagaaaaataaaggttcaataggtatattgtcttgtgtcttccctgagaagactgagaagagggtatagctaaatgagttaggggtttgattttaagggacctgactgggacattcaaagtaaatagtctcagttaatatgtaataatgtaaggctgtggtaaacatagttcctatctctactgcccccaatctaaaaaggtataccatccacagtcatttcttggcagtcaggtgatatctgtagagtactaggttatgtatccttaggagaaacatctaccaaaaatggacaaaactcttctgcccacatgttcatgaactctaattttcatacactatatctcactccatatggaactcaaatgagggccatgcagaaactgccgccaatatgattaatgagtgaactctacactgcctgtcaatttctttaaaaaaaaaaaatgagtcagaatataacaaaatccctatattgggatagattttacagattttaggtcacttgttcaaagtgacttacagacataattagaaccaaaaccaggtgattcaatccttacccagtgggtatttcatagcacattgactatgattatagttttaaaaagtttggaccatatgctcctgtcaaatcattcttttttttaatgcatcatgatgaccaaaacttcccaaactcaaccctatagagaaactcagcagtgccttatctgtgaagggcccatatttgtggaacctcttagctgctggagtttagcagaagcacaattcactgtcatccagtcagttttcaagatgtctctttagattgtcattttattgacagtaatgtgttgctgctgctttacatcaaacatgttaattacttgagtctggagttttgaatttttgccctaaagtgattttagctgaagcattattttgttttgtttaaatcagtcaaataaaagagagagagaaaaattactaaatggaagcccacaagtataataaaagaatggaaaccacagaaatagcaagtttgaagtttcatacctatctaaaaaataaatagaataatccagcttcttcgtgctattctattagaaacttccactactctgggacattccatctcaaatttaaaaagctccgaaaccattcttcactaatcctctttgctagggtcataaaagacttcataatatgtataaaataattacaatctttgaaattataaatctcattgtaaacttatttttttaaacgttaattaaaaccccaatgtcccaatttccccttaaaagaccatatagtataggacaatgagcactcaagcccttgagttgctaaaatttaaaaattgctgacaataacatggtcttttttaagactacagtgtccattgatcatagtgacttcacagttttcatttctctcttatttgtactctaattagcattttgcgtgagtactaatgaatgttgttaaattttaacaatatctattagactttgtttcctgcaaaatgtaactatatctcaagaaataacaactgcattactccatcatctcaaaaaacctgtattagcatttctgcagattyatggttaataattgtacttctttatctctatctattccgttgccaacaagcatacacgtatacatttacactttcacacacagaccaatattggattttttcaaatatttgccaactgctaatagtttttaccagtttataaatatttaactaagtctagccacactgatttgcacctgctttccaaggattttttcttcttctaagacatgtcatataactaacatggtaaatagcgtgatacatttttagaattattttcacagaaataaccagaaaaatatcgattaggcaagtaaaattctacaaccttttatgataatcagagccaaatgacatttaagtagttctattttgttctgtcatttctcctgttccaatattttcacctgtaagtttaagttacagcaaattctaatgagttcttatccgtatgatgacttcttaatatgatagtgattaacatttagtaaccactctgtatgtgtcgggtgcagaagaacttttttatactatgaacttttaacgcattattttatttaattttcacaacattcctttcaagtaggtaccattatcactcacctttcagtagatgaggaaacaatgacatggcagcagcacagaaagaacgagagtccatgcctgatcccttaatgactaggctgcttctattgaacaccattttgagagtaccagagagcaaaataaggcatttgtattggcaattcaagaaattttagggttaaatgtggaacaaaatgggaacactgaaaagtggtactcctgtaatatgtgtgtgaaatgaaaagttacattttcattttcacttccccagcataacaactcttcatatctctgagtttgggcctatattcaggcaacttttttgaaaggcaaatttgctggaggataccttccttcattcatgcatgcacatacctgcctttactattcgcatcttgagccaattttgcagagttggaaatgatgaaactccaggtaggggagagacaaaagtcatatgattttccttctcccactccctctgtgtcccaatttcctgtaaatgtttacttctgtaatccacagttcaaatttattgtagagaatgaaacaatttcttttgttatctgctttagatttaccaaactctacattttgttctagaaattgttctcacttctgttgataatgctccatgtttatatattttgatatgatgtcactttagtaactaataccatcacttctattgaagctgatatcaattttttaaaaggctgaggggacattatatgtgaaactacttagtatggttgccagcaatagttgtaaatcatgctaaataacagaaaagtctcatcattaatccccctatctagtctttttgattcggggagcaaatgctaaagaaaaatttttaaatgtggagaaaaggaaaattaatagcagggatgaaaagtgtgaaggacttgtcacaagcgatgagatgttaatgtattcacaataagctgtaagctacacttcctatcaaattaaaaatatgcatagaaatacccagcctcgcatctcattggaagcagggcaaaatctatttagaacgagagggtcatggcttctagaacagtggggaagacagaaaaagaaagcagagagaaggggacagyctctcacacaaaagaggaagaaaaacaaaaagaagagatggggagttccaaatataatggctgttacaagtgatttgagtctaaaatgtgaatctacttgccagaatgcaaagagcagagaggcatgaccatagaattccagaagctcccagtccagagctatttcctatttccttactaaaggtctcattgagacaaaaatatattcttaactctgtagactgtaaatatgtgttttcaaataaaataaccacaaaacctttgaagtgccctttaaaaattaatttgattcttcttcatgaaataaagaattcttatgtcaataggctgaaaaattacaaaacagatgtcaaataaccttcattttgcaacaaccttctatgaatctgacatctagttatttcagttaacatcatgtataaaactcagaaactccgaaattatgcatccaaagaatggaatactaattcatgacagcatgttgaaaagagcagatagaacaatacaccacaacagtacataaattgaccaaatgagactgcatacgttaccatcttccatgacaacagaaacttactgacggacaatttacatctggtttgctcccttattctgcaaatcacaaaaatgggttgctgtagcaactgccacatgcaatttagctggctggggggaaaacacccttagagtactttctaagaaacaaatacaacatgtatttttgttgttcctcctatcctaaattgaacaaatctcctgacaggtctattttcccatagctttaaaaatgggcttgctctctgttgtttgcatttgtattatgtgtactamcaatttatgcaaaaggtgaaaagaaaaaaaaatccataaaaatataaaagaaatagatagagatgcctatatctagtcacatgaatgtgatagggccattgtcttttatagcatccccactttttatcactgacagctcttttagccagtttaactccactgatgtatgtatcaaatctacgcatgacactcccaggaatacacaacatctcaattcctaatgcaccagcaagggcaagcttatttttctgaatcagaaacaagagcaagtacaaataataggcagttaattttcttagaaacatatttgtaatatcacagtaacacataacatagtctttttccaaggatacagcagaggaccttagaacatataataccaacattggtgcacattggagcagacaaattagcacctacatgctaaataaaatgggaggaatactcatcctttacctacttacttctcaattgggaactaagagaagaagcaaagtacctggaacactcaaagccctgaatgtggaacaattgaagcacaagtcattgttctccttatttaatggcaagtttgacaacttttcaaactctacagacattggtctgatgtgggaaggtcaacttttttgaaggatcttaactatcagcccttgaaataatagaaatctcttctctctggaaactcactggttttgagaaactctctaagaaaaacagtccaattaaaaacaaacaaataaaatgaaaaacagatatgtcttctaccatcaccatttttgccatgtggaaacttctcatgaacttctcactgcccyaggcttgagtgaaaggcttgctattttgaggtggagactcaaatagggcaagagttggtgaagtatggctgctaagagatgtgagggacttataaataatattaagataacaggaattaaagtctcggtgtgtgaaaatactgtatatctaggatgcacataaaaactgcccttacagatcttgcagggaaaagtacctgactatactgtataagacttctgctgtaccatttaatcataccaaaaaaaatggaatcaacacacaaatagatttcttttccactgttctcaatttaaaaataattggagaaatgtgtgctttgtttagaagagtaaaggaaaacattcattcaatagtaccatgcagaatgatttgcttaatagcatttctaatatgttatgcatgtattcaatctacttctttctatattaaaatgcaaaaacaattactctggatgtaaatcctagaaaacaatcaaagtttctattaaatcagagaagagacagttaagctgcaatgtgatttgcagatgctcatgaatagacaatacttagaatctctctcactagaatgtgaaaaagataggtgggagagattcagaaacttccttctttcccctttccctctgtctctccttccctcccttcttccttctctctttcctctcccatttttactttctttttagacagactttgaagaaaagtttttatataaagtctaataatttaaattatatgggcatgtaaaattgccttatattacaacgccagccctacagcaggtagaaaattcctttcaacattctgttgtaaacagtttagattcaactgatcagtcacaggggaatatgggcagtttcaacctcttaccacctttgtctctaaaaagaaattctggatagttctttgtatacttatattaaagccatttctgttcattaaaaactcaatataagcatgttgaagaaggggcaatggaacatgaagcaatgaataaaaagattctgtgcatgtataacaagcattctgtattttactttatctgaatagaattttagaatctacatgctttaattggggcactagyaaagtaataatctcaaatatgaaatacaatagatgcgtttcatgctctgattaaatgtcaaggccacagatttgttatttcagatctagtgagtaataattttgttggctaataatgaactcccaaagatttatttgcaacatttggctgttgcaacatttcaaagctcttggtcaagctgtagtatttccaattctgcagataatattatagactctagcatgcaaagcttaaacttttaagtaaattttactagtttcatgtgtgctgcatagatttagagttctgctgaaattttgcaccaaaaatatttcccagtctcaacttacagcagatattgtcttgatttgcatcaactttttcttaaccgagtatatatggctttctttacaatactgtttttgtttttattgttgttgttgttgttttctcctaaagtacagtgtcttctgtaagtgtcactttctagtgcagattcttaaccccagtctgggtttggagacaaaaacctcacagattgttgatgtattccatttgatcactatcagctggcaacaagcatggtctggcctgcagccacatcaaaccaattttctagaggacttttctcagtacttaacactcaattatattaatgtttattattgctctttttgttgttgatacagctttttacattaattctgaaagtctgtggcactttcaatcattaagaatacattttaacctaaattacatggttttctatgttctccaaatacaaatgtcacaaattttaagaaactaatctgtatatmttatacccccactacactgtgctattactagagatataatatataaaaatcaattgaaaacyatatctcaagtaaaaaagatatacgaacaaaacatacatatctccattagtttcctcacaacagatttattcragatataatgagagtagacattggcttagaagaaatttatgattctttttaaacaatcacagatttaattatacccttctaaagtgggtattgttacacttttgtaatctcctgaatttaaaaaaaacatatttatttctgtttgccaagcttacatcatcactcaatagttcatgcatacaaaccacatgagtcaattcagcattcaccaacaaaacaaaggtcacaaatgagtacctcgtacagcaaatttttttaaatgtataataagatggaaatttataattaaaagcaactgatattcattcattcattcagtagatatttattgaacaacaatagcaggcaatattctagctaggcattggagatccatagctctgaataaaacggaaacaactttaataaagctaacattctagtggagatgatgggaagtaagcaataaacaaaaagcaaataatttctagcagtcttaaatgatctataaagaaaacaacatggtgagaataagaatgactttaggggatattttaagtaaggtggtccgtaaataaggtattatcaagaagaattaaagaccaaattaaagaacaaacatctagaatgtgtaaaacattttcagtacaatttaacatgttcattgccagctacatgataaaccattaactttccttccataattaagttttttttttcaagtcaggtttccaaggtatgacggaggcacatctcatacaagagcaagaaaacccaatcatcatgcttacgaactacaaaagcatcttaattaagttttaaaagaaagtatcatttaatttcactgtgcaaagaagacaagtcagcacacaagtataggcttactcagtgagtaagacataggtctagacatgaaggtgtttcattaacaactagtaagggggcaatcaagtacatatatatctgcgacacaaagctttattacacagagctcacaggaagagacctgaaaatggagtcaaggacctggaatagagttcaggagccatcactgataatgccccttcaactttcaccacctcatgaaatctctctgagttatcacctgtaaagtgggtataactgcacatgctgacaggattattaggggaatcarataaggtcatatatgaaaattgaactgaatttgtacattgtagcacaatatgactgtgactactatcgctgttttcattgtttgttgctattgttatatgatggaaaactgaagttaatggaaagggcccttaaaaagtcttcaggggctgggcgcggtggctcatgcctgtaattccagcactttgggaggccaaggtgggcggatcacaaggtcaggagttcaagaccggcctgatcaatatggtgaaacactgtgtctattaaaattacaaaagttagccaggcatgatggatgaacacctgtagtccaagctactcaggaggctgaggcaggagaatcgcttgaacccaggaggtggaggttgcagtaagctgagatcacgccactgcactccagcctaggcaacacagtgagactctgtctcaaaaaataaagtctttaggatctgaactatactaaaatatgcaaagataagtaaagcatcaaagatcctatctgttcatggatattagacatgaagacatcattagggaaaatgatattctttttcaaatctttgtttctccacacaattgataggaatcagtcattaaagaaaacctcaaaactaatatttttcaagtccatattcattattatgacaaagtttaattatgcttctcatatatttagaatagcttttattcactgaaataatatcttatcttccaagaaaacataaacaataccaggaatgatcacaaatatagattatatcttactaaccagtgtcatgaattagaattaacagaaatcatgaaaaagttttattcgtttttcagtttggatgttgagctccaagcccaaaatggtttagcataaactttactacataactgtcttgaagaatatatataaaaacataagtataaatatcaaacatataagtatagaatacaaataacttaaagttcaaagaatgtttctacatatatgaaattaatgttgagtaattcttgactgagcaatgtgaactatttctgcagtagacattactgatattaatttaataccagttatttaattataaatttccttcacaaaataattttgtcttggcatattggaacagtaaagttaggtgaatgtcccagatcaaatttaagggattccagatcttaaatcatgtgactgtgaagggaaaatttcttctcctaactcagatccaataatctaacactattcattttatccataaaaatgtattaaatcctaacctgtgaagctgctataacataatataaaaccatttgcttttctgagcctaaactgatagtctgaaacataatcctaaattatctggaaagagtttatctactaagaaattttcccaaacaggtgatttgtcacttagctttcacctaatccacatatgagatgaataccaggcttctaagagtgaaatgaatgcaaatttataaccctgttttgaaagaactctttttctccattaagatttagaactccctttggtgctctagtcatgtacaaccttgcaaaaagacgcttatgtgggcatatcgcccatgctcttcatgggtagcagttgtaaaaaaaaaaaaaaaaaaaaaaagttaatgttagcaagggcctacattgcccattaacaaaaattaaaatttggtaggcatcacaaattacactgctttccatccccccccaaaaaaaaatggcccgttagtatttttacttcccccgcccttaattttagccctctctattcaacacataaggcaaaatgtatttcatttactatgccactcttttgggggatctcatatttcccaaatgttcataacctgatatagactagtccttaaatggtatagtagtcaaatattataaacacattaaagtagaattcaccataaagctcttacgaacagaaataatgtgaatcaactaatgtccccccctgcgtcaatagtaattttaaatgaattcaagggggttgtaggcaaccaaattttgcaaagtcatctacataaagtagtcctacataattagcttcaagtaaagagttattgtgaggcttctataaagttaagtgactgaactccatcctgggcgacaaaaggagaccttgtctctgaaaaagaaaaaatacatgcctttaagttaagttaggtgacaggaaaaaggaaatgcaaaactttatttatatattttatttatatatatatatatagtttgtttttttttttttttttttttttgagatggagtcttgctctgtctcccaggctggagtgcagtggtgcgatctcggctcactgcaacctctgcctcctgggttccggtgattctcctgtctcagcctcccgagtagctgggtttacaggcgcatgccaccacacccrgctaatttttgtatttttagtagagacggagtatttttagcagagactgggtttcgccatgttggctggtcttgaactcctgacctcaggtatatccgcctgacttcgcctcccaaagtgctgggattacaggcatgagccaccactcctggccctgaaaatgaaaaaytttaacctgcatatagtgcctttaatttccacacaggaactaaatgacaaagcttcactgacctagcatacatcaagaactttaactctgtctgtcacttcgtacttcagagtgccaccaagtcatctcatattaaccatttaacacgagtgttagggaaagagctcatgtcctgtacagtaatgaatttccactcacaaaaagatgcacaaacatgcacacagccataaatatggcctccatgtcttggttgaaactcaaagccataattcaggaagttttttcaaagcttacagtggaatgtatgttgttctatttttaaaacttttttgtatcctctggacacaaatatagcaatgttgtttaaagcagattgtcaggaatttaagcaggaaacaaaccacagagcatgagggaaatctgacacacttttgaaaagaaaatagacaaacaatcccatgcttattatagggaactaaaaatacagcccacatcgctattatcgtcttccttaggtatagtaacagaaaagcaccatccaactctgaactcatggcaggcatcagctaaccccagcacacccgaaaatgtggtgctataatttagtctcttgtttattgcatttgaaaaaattctttcaaactgaaggagctaattttatttcctttctttcaacgtatgttttatcttctcaattcttagtaaaaacgtaaaacactgatattagtgttgttttatttaatagcaatgagaaccatattttattatatgcagaacagaaagtgaactacccagaaaccttctactctgagttccttcagagtaatgttcccctccaaaatataattttaagatttctgtaataatattgtaactaaaatgttcttcattctctatctatactaggtcattggactcttgtccacaggcttccttaccttctttacaaaccagtgactttctattctgtcaaactgagttaatcaaggaatacaaatgagttgaaaacctttttgctgccatccttttacagcatatctatgcttcaaaaccatccctcctgagawtgataaaagcatttacttatggcaatcaatatagaatagtcttttttttttgtatacatgyctatcatgtcctcccatgtataaggccctagagagtagtgcttgcaagatcagaaagcataaggcagcatacttgtgcctgttcataaaatcaactcaagctgcaatcacttcatttatttttttcttttaactataccagggagatggacagtcttcatgtgacataaagaatggagacttcaaagacaggatatttggctatcttccaataaaaaaatgacttaaaaattgtttaaattatctggataattaccccaaatgttttcatctgaaatgcaggataattgaaagagggtctacatgagacacacatttcccaaaccattgtactgcaaggcacaatgtaagtctgtctcctgtcattcaagcaggggaatttccaaatctagttggaaattcctttgaagataaaaggatgacatcatttaccagtcatactaccacactaacttctcaaataaactggaactaaatcataagaatgagcttttagagaccaaaacttacgagagaataaggaaagcatatttgggcagacttttcctctcaatttatgtgaaatgtgtaaaatacaaattaaggcctaattaaatccctctaaatatctattgatagaaataaagagtggacaaaatgggaaattttaatgcataaatttagtcagtcacattcaaaattttctgaacagaactgaagtctctcaacatacacatacacataaatctacacacacacacacacacacacacacacatttttgccaggaaaacaatgatttctcttacaagtgtatataaattactcctgacatacaaatgtttaaaattcttcaaatttttcatgaatttgtacagctcctaaggatctttttatagactacttctgatgtaaatgaaattagcaccttgtctatctctatgccactgtttgacagacacataaaacgtgaataagcatgaaaaactaaaaatatcataaaatctctgagtaaatcctatcggtatccatccaagtacattgtattaagtttgcacaaagaaatatattggctgggcrcagtgacccacacctgtaatcccagcactttgtgagttcaaggagggcagatcattaggtcaggagtttgagaccagcctggccaacatggtgaaaccccatctgtactaaaaatacaaacattcgctgggygtggtggcaggtgcctgtaatcccagccacttgggaggctgaggcaggagaattgtttgaacccaggaggtggagggtgcagtgagtgagccgaratcgcaccactgccctctagcctgggcaacaggcgagactccatctcaaaaaaaaaaaaaaagaaagaaagaaaaaaaaagaaatacattgaaaccattttgagaatatttaagggttactacaaaaattatataataatagaatttgaaggtgatttttattttagaaatgaagtcactaaaggtcacgaggtctcctcctaactcccgggtctgcatacttacacaatagcctactgttaaagtgctggtaatwttacagacaggcatcacccaaatagagatctctagtttaattataacctgaagcaaattttccatcactatggaaaacaagatgattatacttcaatctaagatgagtgaatattaaggataatgaataaatgagtgtttttcccagagagacctacatttgggaccatataaatgctaaataacaaggtaaataaaagagaggttaaaaargcaaatcaggcaatcaaactccattggctctcaaacaatattgaataatgtactgttatgacatattgtaaattagaattccccagtatatggtgtgatgcttataggaaaaaatataagcatcaagagacaagttatgacttaaaattatcatttgttttactaatcatgtacaaaagtcaacttcacaaataatgctattaatgaagtgctcagttgagcaaaatcaataattaaatataactacaaatcagaattttcataaaaaatgacagtatcatgacaagctggtaatttatgagtatacagaaatgactaccccaatatgaaatgtgcctgtgattaagatttcatccccccctctgtaaaagaaaattataaagagagatttctgtactgtaaactaccctttctaaattatagctgtactataactagattccacaaattggacgtattagggtgagacatttgcaattattttttatttttattatttatttttatatatttatatatatttcttagacagactcacactctgtcgctcaggctagagtgcagctggcaccatctgggctcactgcagccaccgcctcccaggttccagcgattctcgtgcctcagcctcccgagtagctgggactagagatgtgcaccaccaactctagcacacctggctaatttttgtatttttactagagactgggtttcactatgttgaccaggctggtctcaaactcctggccttaggtgatccacccaactcagcctcccaaagggctgggattacaggcatgagccaccacatccggccggaattattgtttaaagaaaactatccccatgtagcacaagcctcaattctaaaaacaagagaagaaaaaagataaaacatccaagattctctcaaatctgcccaaagcatatcttgagactcaggagagagaattgtgctatttaagttactactggtttctctgagagaactttattacaaggcctatattgtcatctaaaggactcatctgagccctatatccagaggaatggaaacagcacatgatttgtttatgatctgcattaatgcttgctgggtaaaaataaaagttcttaaacatgacaaggacataaaataaaattgcccctccttttaaaaaaatctatagttatttctataatgataataagaggatttttgccagtttgaaaatctcaaaatatcagatttgagaatctgaaaatatcagaatccactctaaaaccactctaaaagacagcatccattaaatatatgggtatacatgacatacattttactatataaattttgaacaataacaaaaataatttttctctaataaacaaatttctttataatggcaatcccacacaaaatctctacaatttcacaggacattaacaatcaacttgaaaacaagagtaaaaatttagtgcatattttgtgagaaactaagattcagagagcgatgtgattactctcacatagcaaaactaggcctagaaaacagtttttattttattccttccacaatactcaactgccttataatttcatctgagtgaaactttattatcaaaggaagagaaacacccaacaataataacaaaaaaggcagtgcacctatacagttggaggaaacacctttctgagaagataccaaggtgtgtggtgctgttttaaaaataaacatttgagagaaagtagaacttagtggttaaractgagctttagaggcaaaatgaaggaatttgaattcacatctgaatttagatgaagtgctctaatcgaggcaatttacttcctactggttagtctgccttaatttaatgattaaagtaactctctagtttgtttactactgtgtagataaaaagataaaatagaaataatggcaggtaactaatttgatagtctttaaaagccccataatgactaaaattcactgatcctaaatttgttaatggcatgggactagagtattgaatataaacttgtaatcaattaaaaaacacaaaggttaaaatcagataagtgagtttacacacattcaattgttagacacctttggaaaaaatctttgatgttcacagaatagtatcatgtaagtttgggatgtgaaagaatcttacaactcatgcaaccaaatttctaaattatagagatcaataatctgaggtacaagaaagtgaggtatcctgtccccagttacaaaatcatccagtaaacctggcccatgtttcttaatgcaaaacaaattttctttcggtgtatcaatttctcattgacatcagtttttaaggatagcattcattaagctattctaaataattaccattatccatttcctgagagttgtcatataaattcaaataatttgttttgaaaaactggaaaagaaatatttcccaaggaaaatagaacagtcttttacaaggatgcatttagtataattcaacaatacctctgggatatggaaccttcaattagaactaaagaaagatcaagtcttacaacaagggaataygaagttagatagtgggagaatagaatttaagttctttatacaaatgaacttagccagcaatttgctatagaagaaaaggaaaaactgggttttaatgtacccatggcaatttttttcttcaccaatttttcaacttaagtatcaaaatgtttcttttcctcacactctgtagtctttataatacacataataaagtgcaaagaagaaggcacactttgttcttaagctttagcattgcaaaaactcatctaaaagacagtggattttaaatcttcttactcacatgtcctcactataccccagctgatttttcataagtatcacaaaagaccacagaacattcatgttgctccttttggaggaacagaattaagcattctctcctttgtgcatccacagagcattgcacacatttttaytgtaaatcaaatctactgtgcatcattgtcctcagctatttactcctttgataactgaaaacttggtgagcagatattttatcttatttattgctgactttccagtgtctatgataatgcctgccaaaaagtaggtgttggatcaatatttcataaatgatgaaaaacagataaagaagctaaagaataaagatctctttactaaggaaaagtagctttatccataaaagcttctacatataattataccaagaaacaatctgtattttcacataaagaaatctcaaattataagtgtccacaggaattggatatataagatatgagaattcttacaattgtttgattttaacggcctaaactaggttttaatcccaccccaccatttatttgttgtgtggtatcaggcagatgggtctcaataaccttacattaaaaagtggagattaatgtacctcaccaacctatctcacaagttcattaatattaaattaataatgaataagaaaaggctttgaaaactataaagcactaagaagatactattattacttacttattatcctgcaaatagcccatactaaatagcatattaatgaaatatcataatcatttccacagacttaagaaaaagtcaatattatgctaaagaaacgataaatttctatattctctattgtgtttcccatactattgcttcctacagaccaggagaaacaacatttgaatatgctcaccactataaacactctcatttgcaaaagctttcagaagaaatctaattcaaaatgtggttgtttctagcatatggctatgtaaatgatgaaataagaaaacattttctaattaaacacaaatataaattttaagacacccaccaggataatttcaaaaagtggcattatattaagactcccccagaaagaatgcctcatctttartatttccaaacctctagttaacttaaagaaggatataggtacctctctgctctgctggagaaagcagacctaacgaattaattgacagaagtaatggtttctccattctcagctaagtgatttatggaaacatacagaaatgcaattggactttgtacctaggtttttccttcattctggacatacaggggcaatagatttctattttcattttattcggaggggtatatgctcccaaatgagcatgcatacggaattgtaaccatctgtttacttctgtttcccctccagactgaaattttactaaagaaatcaaccatatctaagtcatctgttttccctctagctattaacccagtaattggcatgtagaaagtgctcaataaatgttgactggataaattgaagaataaagcacagatataatagattaacttttctcttaaagtctaacattcctttgtattagcctgaattttaatctctggattttagtaatatatgtaacacaaatttgatgttagtaaatacttatacacattaaaacagatttactgaaattagaaattaagcagatagaattacttaagtaacatgtaaaaggatgcatacaggattctactaatacaattcatttatcagttcattcaaaacatttcttgagcacatactacattataatgataatgcccagaagataggatgcaaagccaggcaggcctcacgctctcaaggagkttagtgcctggtgaaggaaaggatcaaggaaatgcctgacagaaacaagtgctggagccatgggaccactgtgaaggggcagctaagtacatgtggagggaggggttatatgaaagtcttgtatgaaagacttcccagaggggagattcttgaactgaggtttgaaaagacagtaaaacataatttaaaacaaagaaagaagtattccaggcagagtgatgcaaccatagctctaycaatagggagaaggttgcctgcaggaaaatggcagacggtgaggtaaacatagaaggatctccatatatcaaatttgcaacttggtgttggaaatgattatatttcaaagacactggtatagatttaaaagaaaaatatctaggtctttgtgttactgattgcattaatccgttctcatgctgctaatagagacatatccaagactgagtaatttacaaagaaaaagagatttaatggactcacagctccacatggctggaaaggcctcacaatcatggcagatggcaaaaggcacatcttacatttaggcaggcaagagagaatgagactcaagcaaaagacatttcccctataaaaacatcagatctcctgagacttatttcactaccatgagcatgggggaaactgcccccatgatttaattatctcccaccaggtccctcccacaacacatgggaattatcggagctacaattcaagatgagatttgggcggggacacagccaaaccatatcagtgatgtaataaaattgttttttcattgttagtaatggaaggtaagttattctcagggaaaaataaaacagccaaatgttaatcttgtgaactttagttamgaatgataacacacaggtacatctacagcaagttaaacttaatcttctctgaatactgcaaaactcaagtcactttatgcaaaggagactatggagagaagtatgaatgaaaatgggaaacagctaataccactacatctagcttacttaacattttataatttttgtctctaaatcctgtctcctgggaacctgttgaatcgcaatctaactcatttggttgtaagtgaacagtattattcatttattggccttttatgttgcctctctaacaggcaaaaaaaaaaagccatgaacagttgaaagatttaaaagttgttttccttttttccctataactaaatttcaaagctaatgaaaatataacaaataaaattacaaggtataaacaagcaaagatttgaaataacagaaaacttctggaaacacattcattaaaataataaatgtttaaccttttaacgattaaatttctcagcctgcccaatgcctaggccaagaattatcaaggacatatccttcgcccactttttgatggggttgtttgtttttttcttgtaaatttgtttgagttcattgtagattctggatattagctgtctgtcagatgagtagattgcaaaaattttctcccattctgtaggttgcctgttcgctctgatggtagtttcttttgctgtgcagaagctctttagtttaattagatcccatttgtcaattttggcttttgttgccattgcttttggtgttttagacatggatatgaacagacaattctcaaaagaagacatttatgcagccaaaagacacatgaaaaaatgatcatcatcactggccatcagagaaatgcaaatcaaaaccacaatgagataccatctcacaccagttagaatggcaatcattaaaaagtcaggaaacaacagctgctagagaggatgtggagaaataggaacacttttacactgttggtggggctgtaaactagttcamccattgtagaagacagtgtggcgattcctcggggatctagaactagaaataccatttgacccagccaacccattactgggtatatacccaaaggactaaaacatgctgatataaagacacatgcacacgtatgtttattgcagcagtattcacaatagcaaagacttggaaccaacccaaatgtccaacaatgataaactggattaagaaaatgtggcaaatatacaccatggaatactatgcagccataaaaaatgatgagttcatgtcctttgtagggacatggatgaagctggaaatcatcattctcagcaaactatcgcaaggacaaaaaaacyaaacaccacatgttctcactcatagttgggaactgaacaatgagaacacatggacacaggaaggggaacatcacacaccggggcctgttgtggggtgsggggagggatagcattaggagatatacctaatgttaaatgacgagttaatgggtgcagcacaccaacatggcacatgtatacatatgtaacaaacctgcacgttgtgcacatgtaccctaaaacttaaagtataataaaaaaaaagaattatcaaggacagtcatgaaaaagataaagtcaccaaacatactgaagtacttaaactctaagaatataatttatacatgaaataattataattaggtaatgaatatcaattatggtatttttcatttgtactaattattgttctcttttttctttcatatttcattttattacatttagcatcatgctgctattcctgcaaatactgaagaagcatgggatttaaatattttacttctaaataaatgaattactcaatctcctatgaccatctatacatactccaccttcaaaaagtacatcaatattatatcattaaggaaatagtaaccttctcttctccaatatgcatgacatttttggacaatgcaattgtggcactggcacttatttcagtgaagaaaaactttgtggttctatggcattcatcatttgacaaatgcaagcatcttccttatcaatcagctcctattgaacttactagcactgactgtggaatccttaagggcccattacatttctgaagaagaaagctaagatgaaggacatgccactccgaattcatgtgctacttggcctagctatcactacactagtacaagctgtagrtaaaaaagtggattgtccacggttatgtacrtgtgaaatcaggccttggtttacacccagatccatttatatggaagcatctacagtggattgtaatgatttaggtcttttaactttcccagccagattgccagctaacacacagattcttctcctacagactaacaatattgcaaaaattgaatactccacagactttccagtaaaccttactggcctggatttatctcaaaacaatttatcttcagtcaccaatattaatgtaaaaaagatgcctcagctcctttctgtgtacctagaggaaaacaaacttactgaactgcctgaaaaatgtctgtccgaactgagcaacttacaagaactctatattaatcacaacttgctttctacaatttcacstggagcctttattggcctacataatcttcttcgacttcatctcaattcaaatagattgcagatgatcaacagtaagtggtttgatgctcttccaaatctagagattctgatgattggggaaaatccaattatcagaatcaaagacatgaactttaagcctcttatcaatcttcgcagcctggttatagctggtataaacctcacrgaaataccagataacgccttggttggactggaaaacttagaaagcatctctttttacgayaacaggcttattaaagtaccccatgttgctcttcaaaaagttgtaaatctcaaatttttggatctaaataaaaatcctattaatagaatacgaaggggtgattttagyaayatgctacacttaaaagagttggggataaataatatgcctgagctgatttccatygatagtcttgctgtggataacctgccagatttaagaaaaatagaagctactaacaaccctagattgtcttacattcaccccaatgcatttttcagactccccaagctggaatcactcatgctgaacagcaatgctctcagtgccctgtaccatggtaccattgagtctctgccaaacctcaaggaaatcagcatacacagtaaccccatcaggtgtgactgtgtcatccgttggatgaacatgaacaaaaccaacattcgattcatggagccagattcactgttttgcgtggacccacctgaattccaaggtcagaatgttcggcaagtgcatttcagggacatgatggaaatttgtctccctcttatagctcctgagagctttccttctaatctaaatgtagaagctgggagctatgtttcctttcactgtagagctactgcagaaccacagcctgaaatctactggataacaccttctggtcaaaaactcttgcctaataccctgacagacaagttctaygtccattctgagggaacactagatataaatggcgtaactcccaaagaagggggtttatatacttgtatagcaactaacctagttggcgctgacttgaagtctgttatgatcaaagtggatggatcttttccacaagataacaatggctctttgaatattaaaataagagatattcaggccaattcagttttggtgtcctggaaagcaagttctaaaattctcaaatctagtgttaaatggacagcctttgtcaagactgaaaattctcatgctgcgcaaagtgctcgaataccatctgatgtcaaggtatataatcttactcatctgaatccatcaactgagtataaaatttgtattgatattcccaccatctatcagaaaaacagaaaaaaatgtgtaaatgtcaccaccaaaggtttgcaccctgatcaaaaagagtatgaaaagaataataccacaacacttatggcctgtcttggaggccttctggggattattggtgtgatatgtcttatcagctgcctctctccagaaatgaactgtgatggtggacacagctatgtgaggaattacttacagaaaccaacctttgcattaggtgagctttatcctcctctgataaatctctgggaagcaggaaaagaaaaaagtacatcactgaaagtaaaagcaactgttataggtttaccaacaaatatgtcctaaaaaccaccaaggaaacctactccaaaaatgaacaaaaaaaaaaaaagcgaaagactgcagttgtgctaaaaacaaaacaaaacaaacaaacaaacaaaaaagtaaaaaaagattactttcgagagagaagtttaagcttcaccaatgctgctcctgaccaatggaaatatgtacaacttcagcattttaagtaactggcttsaaggggtactgtggcaaccaaataaaataactccattttctaaaactttcatgtaacttttatgtctggactacagttcaagtggacaaaaacatttctgtattttttttaagtaaataagagtagttgaactgagcaatacctcctcctgtgttgtattacacatattagccacgagtttttgcagtgaccagataaacttgaattgacacgtggtgtaataaaatggacaaattctgtagagtagacacagtgagtatgtggacctcttttataaggaaaaatacattttggattaaaatcaattgcttctgtcttgttttgtttctaaataaagaataatttctgggaaatatcatctgatcagatatcatttaaatgataaagtttttaaaaggtgtttttctataatgaaatttggaatgctaagagtaagacacttttcttgggtgatgggactacctacatttttataaagcctcaaatatggatttcagaaagcatttaatcaatattaaatagcaatcataayttgtatttaaccctttaactattgacagaaactctaggaaattatgtattcacttaaggatttttttaacaagtagcttttggagtagattaaattattaggttgagataatataaattcagtatctgggcaacataaagtcttattttaataattagcagtagcttagttttaggccgcttgctttttttttttttttttttttttgagatggagtctccctctgttgctcaggcaggagtgcagtggcaaaacctaggctcactgcagactccgcttcccaggttcaagcaattctcctgcctcaacctccagagtagctgggattacaggcaggtgactacatctccggctaatttttgtatttttagtagagaaaaagttttgccatattggccaggctgctctcgaactcctggcctcatatgatctgcccacctcggtgccccaaagtattgggattacaggcatgagccaccacgccaggtctaggctgcttgctttgcagaaactattgccaaatttcattatgacttatgctctaggtataattttcaaatctctctctgattcaaaacagttaaggagcttcactgaagtaacaagcaaataacttaataatttactatattgaaacatggcaaggaaacaacatgtttcagtccaacactaagattttaaaattacaccataaaacatatagcattagtagtagaagtttaacaggttcgactttctgaaatttcttttatttagctcactccaatataaaaatgacacaattcagatactttcagagtttgacacaaatttaagaggaatgatgttaactaaaggaaaagcttctgaaactattttaaagtaaaagaaacaattaagaatttaattttttagtccagtcctctaaaaatatatttaaggcactggaaacccacagcttaaaagattacaaatcattgaattgaagtgccaagtacattagtagtcatttaaaaatcttatatagggaatatacggatttcacttaaaaaaaaagagaattaagatttttgaggatttcmgtcatttttacaaacaaacccccacagtcctgcaaaaatagaagtatttttgtacaaagcaaacattctgagacaataaaataccacagtttttataggcaaattgtttatctctcaaagttacaaagctttcatgttaattgctactgtgtctgctcataagcaacttttaacttttcttacaatagctttctgcataatatcaacatctcactggcctataaacatttccagcactgtagtcatatcaatttatttgttaatattagacatttattttgtgatagcatggacagtttccagttaaatcctagctgtttttgacaatgtggaaggcaattgttaagaatttcttaaaacaagagggtaaattgagttgattttaacacaaccaaaatatgaaacttgctaattcaacgtgtttctcaaacacaaattttacaacccgatgaatcactatcacacagaggctgacgttagaatttatcagccagacatgctcatacatcatgagaggtttcagcaccacaaacagagctttacagagctcagctatttgtcaaaaacataggagccaaaatacaacctattaggaggcaggcatagtataggtcagtaacaacttgagcatgtaccttgtatgtttctttgaaacctatctgcctgaagaagtatyacaaacatatcatagcactgggaattcattttaatctacatatttcttttaaagtttgttaagaaatatgcattctgaatagacatctagtagtgagcattaaaatgaagtatttctgttacaaccaaaaatatacagatgctcaaggcaaatcatgaacctactgatttgcttaaattttaatataaatttccagtgagagagaaaagacatctgcttcaatgagaatggtgtttcatactctctctgttacctcttaatcctcacataaaactaagcattggtcaaagtactcaaaccatttaacttacaattttgtgatatgatatggatgttcttgttgcaaaacacaactttacctataacaaataaaacgctaaagtttatagctgtatgaatgctacctaatctgctcaccttgtatggagaaaaacaccttggcacaaaaataatttttgaagaattacatattttataattgatactacaaaataaaattaagattttctaacaataagcatacccaattgaatacaaaaatatataaaaacagtgcaaaacaaaatatgtattttataatgtatataattgtcagtaaagctaagcagcaacaggttggcagacatatgctaaccatttcaccaagaaagaaatgaaacagatttatggtacatatactagtcatttaatacttattttagtgttaaagtttttattctaattagacaaaaagtttttaagtaaaactacacacaaacataagtttaaaacaattccttagtttattcatttaattatcttttgtttatattcaataaacatttattgtatggctattagtcacaggaaaaagagaaataaataggacaaattttcgaccatctaaaacttatattctactagattatattctggtttattttctttatcagtgttttcacaaatacatgttaactgtgtaatttggtaaagtcccagccttaatcattcatactttcacaaaatgataatgctcagaaaaaatacaaggtttttttcttggtctaaaatgttttactcatcacaattttgatgtaaaagcttgcttcaaatgtaatattgattttattcactatatctgcagaaactagcctaatagtattctttagactggctaaattaagaggcatatttaggctgagtgtgatggctcaagccggtaatcccaacactatgggaggcttaggtgagtggatcacaaggtcaagagatcaagaccatcctggccaacatggtgaaactccgtctctactaaaaatacaaaaattagctgggtgtggtggtgaatgcctgtagtcccagctactcgggggcctgaggcaggagaatcgcttgaatctgggaggcggaggttgcagtgagccaagatcacaccactgcatgccacgctggcaacagagtgagactccgtctcaaaaaaaagaggcatatttagttaccataaattatttctatgcataaaacatggatacctgttatgtgacccctatttcaaactcaaagagaaaatgagaagtgaatttcaaaaaggtttatctagcatagacaaaatgtctacatatctttacaaggaggagaaccaacttactctatccacattaacccttacaagatgttccaataactacaaagcatagtcttaaaatttcagagattaacattttagatgaaaaatccaaaatgtgtcagaagctactaaagcaaacaataaaaacaactaaaaagtttaaaagtatgcatgtattaaggagtgaaaaaatctcaataacatatctcacagccatcaaaaatatgaggaaataattctaattatatatgtcaccattcacagtatcttgggcttcatcacaatgctgattttctaggagatagggagtaattaatagtaactaaattgtggctatattttctttgatccaacctttttcctcaartttcccacgacattatagcaaataagtaaaaatttttgtgaagaatatagttgtcaccattatatttactatattatatgttatatatattattaccattatatattactatatttaagggtcccaaaaggatattttgcaatcaattaaacagaaaagactacaatgatcttctctttcagatgctaatattttcactacagctttgcttctatatatcattttaccctaacgaatgcattgctaactaggtcgttgcttgggagaactacagcgttgtactggaatgccacatctagaaacagctacaatcagtatcatggagttttgggaaaagacagaactgactccagttttcacacaatagtgactacttttatctgttcatttgaaaagtaaggacttgagtgttaagagtgaccatggcctagatttacgttattcttctaaaggaaaatgaaaatattatttttacagaggagcaaagtgcaaaatcagagttaatattaacagtcataaaacatatatccaattataagaaaaattattaagagaaaaaacttttaaaaagaatattacagcagaatatagattatttccaaaatttggcctaaacatttcatttacaatatacacagaaggctcatgaattgagtagtatgcatttagtattctcaagtgagaagacatcatatgaaacagaacatgattcctttttgttcatactaaaaagagacaagcctacagagatttgaatttacctattctagttcactgtatatacatctcagaaggctcctagctcatctttgaaataagccatagagcatataccaacgaagggtgtaaataactcacagatatgtcaatacgactttttcttaggagcaaactgaagaattcaaataagtgataaattcaaagctagtatcatacacaatttcaaaattattgagaagtggcccagagtaacagcatagcaaaaagaattgtggttgaccttagtaagccttttagaaggatgagctacaacgacatttggagacctcacagtactttgtgtgtttatatttaccttttctaactctactacatcaccaagaaactaatagtatgatgtgaccattgtaaagaaaatccagcttctcattaaaatatatggttcagtgtctgaagttattgattcaaaatccaactgtgatactccttagtaatgtttaccagactctggaacaaataatggagtgagcttggaacataaattaaccctcttaatcctcacattgagagaatcaggctgtaataaaataacctccctgtcatttgtggtactagactcaaggctggtaaagacagaaatagttcttaaaccaacagaggtatcattattaaagcaatatagctaaacacacccaaatggtctttcaaaagaatacgatataaaattgaaattcattatcagaactgggattaaggtcagatacctctagtaaacatctctttaataatggtttcagagaagagtcacctattcaataaaaaacaagaaatcatgtctccaaaacaactttaaagctcttaccttcctatccctatttcctagtaaattaatcaatgaaacaaaattctagtacagaactttcatattaaatcacttattttttcaagattttwaaaaaaattacatataaaatgcatgaattcatataagtatatgatgctaacaagtcaattcaaacctttgagtgtaaaaaaatttcttctaaccacggatatggcatatataaaatgcattttaaaagtagaaaaaaaaagattcatttctttctacaaacaatatattttccacacaaatcaataggaattaagtgattgcagtgaaaaaaaaaatgaaccacaacaaaaataactgtgtgaggctaaagggaattaggttttccttccagtggattatgtgtgccacagtccaggctcagtcctaaagtgacagtgcaacgcttgagatattctgttgacgcatgcatagaaaataataaatatattattaacatattatgtttggataaacatgcatttatatttacttgagtagaaagattacaaattaagaaggaakgaaaaaggaaaggaagaaaagaaggaaacattcactaaattgtgaatatgtgccagattaacaatttgctgtgctcttaggaaatccacttcagatctaaagaagaggtgtgggaaaatgaacatttgccatcttacaatatgacaggcatgctgatagacaggcctkcacatctctttctgtacatgtataatgtaatatatattacatataaatgtgtataatacattacataattacaacccaatttatgtgatcctcatgaaatttctttgagttcagcattaacattccaatttatatatcagtctcagagaagtatttaagtatttttccccaagaaaacatacgaactatatattcatatagttaatatgaatgcatattaactgtaacaaaaataataacatagagcaaaaaaataaaaaaccaaatgactcaacaccaagagaaataataacaggaactttataagcatgccataactcacaacaataactaataggtgattttttggagagggaacaatccatcaatagtacattagattcattaattgttcctattatcttctaactctccccatcagtatgttcttttataatattcctatctcagtttcgcatcagaaaatggggataaagagtctttatttgtcaaattgcagttactacttatttgccaaacacaaagaacactagtttatcaagaaaggaaaacctatgcatattcttataaataaaacctttaaaataggaatatacatgaagttccaagtagatggaaggctagggacttttaaaagaatttttctgcaattatttccatgcatctacttcacattcccaatctataaagctcttctctttctcagtccattacaggaaaatacagaatggtcaattatgtttaacctgcttgccaactctccgattacacttatcatgcacaataactcaatcttagaaggtacatcctgcataaaaagtgaagtttgagaagacagaaacttctcttcaacattttcatccttgtgagtactgacactataggcatgggaaactcagaacaccacatcaacaccaacagcttagagagtcagatgtcattgtgagctgataatgcttagctttgttgactgacgtgtaatctattgcaaatcttgggttcttaggagttctactttataaattgtataatgtagttcaagagaacaaaattatttattatagtttagatgacagggattgcatattgataaaagaggtagcaaaaagtttaaataaaaactggacaccatcaaacttatctgtgtgattaaaatctatagctacccatagaggaaggtgatcatctatatgtctgagtgaaagaaagaaggtggttctttaaaagactttcttaggttaatgagattctatggaattaaattgacatgcagaaatattttcatgtataaagaagctcctcagtattcaacgagtactaaagtcactatgttgacctatgttctcatcccaaatgatatggccaagcttagttgttgttactgttgttattttaatgagtcatttgtgtgttagygctccttccaaggatcaggtctaatagtagcaaggtttctaagcagggaagcaaggagtggcccatgctttattcacacaccatttattgaagatctactgtgtaccagacaaaatattagctactagagattcaacattgactgcaatagacaaatctcctgacatcctaaaactgagagtgaaaaggtaaataccaacaaatgaatctggcaattgcaattcagggaaacaaaagtatgataggcagagggacgattacacatatttggggggagtacaacattctcagttactgtaacgtagtccagagaggcttctaattcagagctaagacaatctttatacaatatcccaattagagggcagagaaatgttaaggtagattagggatggcatgaagatactaataggctgaaaatttttagtaatgacagagtgctaggcaactgggagaaagttctgaaggacaaagcaggagctggcttcagaaagaaaaatcaggaggtgggtaaaaatcaaacttcattttgtgctaaccatgttagaaaccaatatcctaggaaaaaaatgactatgccaaatttaaaagaccagaattaatttataagggtacaaagattcgtttgtcatatttcaatcctaactccctatgtagtctagcacccagcttcctccagaggtagaaatatgagaagacgtgggaaataaaagacaaaagaaaatagacataggcacactctatactccaccctcttaaaccttccctaatctgaaatcacacatactcaaaagcctcataagcgtactctcagaaacaaacaccctttatcttcagttattatagtccagtatttgattgatatctaatttcagatattttaaaaatacatctcctatgaaattcgtagatggccaaaatgtcactccagctttctactgtctccccaaaggacaaataaaggaaagagagcctaagtattctgggtaattttgtatatagaagcccaaatgtaatgtaaaattgtgattgatgtctttgattttaagattgacctagttctgtttccactgtcaattgtatttctttttcagaaatttcacaaatatgttacatagagtttaatgagtatataaacagatataggaaaaaccaaaaaaagtactgtgtctaatttccttagactatattttgtataataccagacatacttctaactacctagatttttatatcactttcttcagataatatttttaaaatcttctctattatgtttccaattggaacgttgaactcaaaacttaaagaaagagtatttgtagatgtactgatccacataaatcaggtatccattctatattttctatagtttcttatcattgtgccctcctaagaagcaaagttttattaatattatctaagataaggtagtctaatttggattattaagagtaaaaagtgcattatgtcacagcatttttgaaagctcagttttgaggatgcatttttatagtattaacttatctcttctgttatgaaaaacataaaatttggagatatttttgctatgaaattttatcagaagtgttttggggaactctgatacatgcattatgaaaatagttatttttcaattcttcaataatgttttgtttgaaaaaaactttcggagattttcgcctgaaaccaaagagaaaattctaaacaaaaaataaataggataaaagcacatcacatccaccttcctgtgacatttaaaatactcatacctgaatatactctaaaaagacctctttaatatcctgatgctagctcctaatttagtggagaggactccatctcaccacagcagatgtgtccgttccatttcactatggtatcaataatagaaaagggccaggtagcctcttaaacaaaatatttactaaatatatttaacagagtaattttcattttattgataaggaaattctaccccaatactaggctatactactcaggccaattgtttcagtgtgaatactcagaatatcaggtagaacatgtaagtaattcggcacaaactgtcatctcattctggaaaaaaatgaatccagttttagctttactgaaaccagaagatataaaacaccataatatctatgagaccaatggcccctgattttgaaactaaaatcaaatatgaggatattataacactctactgattacatatctataaagtactttttaagatataagacatactcatacatattatgcctgggatttaatttattatccatgctaacctaccttgatgaattattggtcataaggaaggagaaactgaataaaaatattttcagacaaatctgcaatcccactgagtctttccattcctccaaagtgagcactgtgacagagctgtgtctttcttagaagtgatgggccttatcaataaagatttttactgtattgggaaaagctaaccctgtgatctttaaatactctggcttcagaaaakaattttaatattaaacctcttccaaagttctkgacttgaaatcccaacattaccatcatgatgccacattattattttaaaatacaccatttcaaatatgaaataatttttacatgttaataacttagtatattttattgcagaattaacatatgcttattatacaaaatcaagaacatacaaaaaagaaggcctcatattctccctgtctcccaaatacactattacaaaagcctgtcattctgcctttgacaaactttataatattatctcttgactccactatttcactcttaatccagactagagctgcccacactttcaaggtatcatcaaagacctcttatctcagaataaaagatggcttcagtgcccatcctgttatcctcctacagccctcaaacctcccaatgatgtgactgacagacrttaccattatatagtaaatagtaggtcagttgcttatatgtcaccctacaattttttttttttttgagacggagtcttgctctgttgcccaggctggagtgcagtggcatgatctcagctcactgcaacctcggcctcctgggttcatgcaattctctgcctcagcctcccaagtagctgggattacaggcacccgccaccatgcccggctaatttttgtatttttagtagagacagggtttcaccatcttggccaggctagtcttgaacttctgacctcatgatccacccgccttggcctcccaaagtgttgggattgcaggygtgagccactgcgcccagccaccctattacattttttaaaagtcctaggagtaaatagatttttccatctcatggtagcctgagatatttgtttctttctaatcttaaccaattctattttagaaataaaaaaaaatgaatctaatctacatcccatagggcagccctgcaagttattgattatgctagcctttctctaagttttgtttgttccatactgaagaaacccatgtccttaaagcaattcaggtcactcttctctggatatgattcaagtcattaaagtctctcttaaaatatagtaccagaaattggatgcagtcctccaggtgtgctaatctctaatctctggagtagtattaaccaaattcctgcactattttcaaatggaagcaaagccagctgtaaacggacaaagataattctacttgatcccaaatgatgtggctaacagcatcatcaatatcatcatcaccagcacttaggaaatgctaagcatgaacagacatataaactcatttaacctctatgagaaagattctttcagcaaccatattttatattatcagtaagaaatttcaggtaacgaactttaaggaacatcactagcaagtttttacaggtggtagtgacagggatttgttctccatgttaaacaaattgaaaggttgaaaggtggttagcttgctgttgaaaggtggttagcttgctgttattatcataacagcacagaattaagaatctcactacaaacaaacagaaatgcataaatctagaggctaacgatatatagtcttcgtcatgttgaaatgctgcaaaaatatggtgggttagttcactttctagtggcaataaggtttggtggaaatgtggtamatttcctccacctcagctatttgatagcatttayagtggtataacagaaataaagtacgctttatttacgagaagactcattctatattcaatttataataataagcatgctggaagagccatctggataccttataaaaatggtattttccattggaagtaaagaattttaatcagtgttagttggtaattattcatttcaccatttcctaatcatgtcaaaaaaaatacgttaagccagaattcacaatttttccattatgcaaaaacaccaccatattgttttatctacttagtaagatcatttttttctatttcatacactcagaccacattgctcaaaataagaaaaggcaaatataataatcaagcttgataagccaagaagcagagcaaagataggaaaaaaataatttgatttgaggaataaaaatattaaattactacttcaatgctctgaatgataaaagcacagtcagaagcagtccatttctaaaaactaagtggtatttcaacagctctaacaaaggagaacagaaactagtcttggatttttatgagaactttaatatgaatgatttaagaaattatactttaaaaatctcattcagttaaagtacagatgtatatgctacaacttttggttttggttttttgtttttagacagggtctcactctgtttcccagcctggagtacagtgacatgatctcagctccctgcaacctctgcttcccaggctcaagtgatcctccagcctcagcttcctgaggagctgggattactggcatgagccaccacacccagctaatttttgtgggkttttttttgtacaaatggggtttccccatgttgcgcaggctggtctcgagctcctgagctcaaagctatctgctcccctaggcctcccaaaaggctgggattacaggcctgagccaccgtgaccagccttgtgctacacctttgtataaacctactttaaaatacaaaaaggtactccattcattcttttcaaaagatttagtgaatgtgaataatgtcayattgcctagagtaatcttgatgtttttgttccactggaaaaaaacaaggtccctttagctaaagcttttcttctgctattgtcacttcagcactagcaaaactagggtgacagctcataaagaaaataaccaaaagctctcactttgtccaatgacgtggcagccctccagcactggcatttcctgcccyaaattaactccaggggccataagatcaaagtaagaaggaagtagcttgtctttctctttagttgtggtagctactttgtattacataggcaatataattcaytgtttcttatataaccgcttatgctattttacattgtactaggcatctgcaaacaaacaaatgttatttcttgttccaagttaggtaaaacttrtaaataaaaccctgcaaaatggctcacaataaatcaaaatagtcctacaagaaaacagaaagctagaaaaagattagagataaggtcctgccaatagataattctattttaaaagaaaaaaaatcagctgaagtcctatttggttctcatgaacctgaaaagatagttagttgttttgccagaaaaagagtcccagacattatttggtcacttgcctggaatagcttggcatttctgcaccctcaagtaataaaacttacttgtaaaaccctttaaggcaacagagattgcctgtatttattttctaggaagggaaaatattgaaaattatgatgtattcaaagaccacaactataggagaaaatgccatactgctaaatgtttttcagttgacatgatcttttaaatcatctctattgatcyctttatttaagattcgatttggctattgtgagaataatgaacaaataaatgaatgtgatatccatttgatatctagtatttcaccaaaaaaaaggaataagcctggatttttttatctttgccctatttacattgtacaatgaggaagaaattttggaacggagctaacaaaagatctaaattaagacaccattttaaagctctgggaattacagtggcactattacccagaagcaaaaatcctaaatgattctatgaacaggtaacaaactacaaaaaacaggtaacaagggccagagactggactaggttggtatttctttttgttcaacaagtatttactgccagagactggactagrttggtatttctttttgttcaacaagtatttactaagaaactaaaatgttagaagcttcaggggatacaaagataggcaacttccctgaaataattgagaattatctatggtgggaaaaactatgagaaaggaaagagattttttaaaaatgctatagcaattaagcagcttccagatatattttgggaaaattacagatagtagtaattagcctaaccctgatatgcaagttaatcatctctcccatctagaaagttgttctttttgtaacagaagacacataaaatagtgtctattcactttataaaaatagcaataaacctcaaattcctcaagtagaaacaaaatacattttcctctaaataaaaaaaactattttgagctaggaaaagagaatacctattaaaatgtattttgcttgctggaaatctggttcaactcacaatttcccagcaaaaggaaaaactaggataattctttctctgacaagattgcctgtgctgttggcaacactcttcaaaaactgaaactctaatttttaattctacagttacctcctagccttccatggtctcatctactaaaccacagttagaattacatttcctacatatgttattttcttggagttcaatgaacaggactgaaaataaagatcagaaaagaaagaagagagactcaaattaaggaaaccaactaaaaacagtgagacataagaactaaaaggcaagggaagaaaaaagagacagagaaaagacagagttggggcaagaaggaaagagggagaccaagactcaggggggatttcagaggacaaagccttctgtctactttaagtattagcttacttgacttcattaaatgttggcttgtgtctattatcagctgctctttactgccctgtaaaacaacaataacaacaaaaaactggttggcaaaggcagatatgacatgaagtagcaatgacctggctaatatgaacctttggacaagatcatgtcttcctgagcccaggtgcatcratactggatattttctgcatgcccattcaatctacagggttctgaaacctaaataaaattcaatgtaatagctgggtgcctttcaaaacactatgcatcatttactatcatattcactgttgaataaactttgtaaaaactgagaacgtaagacatgagaaagctaagaaatgtaattgggaagggctaaataagttaacagggccaagccattttggccagatggctttttgcaattttggaaatatctgaacttctcacaaatgtcacaggatgtagaactgaaaatatttccatctgccccaaccaaagaaactattgctcttcattcatgcaaatgtaattccatgctatcccccaagttattaagactgttcggccatttaagaagaaaaatagtctattcttccactgaaagagtaattctaaagccacttaggtaaatgactgagtgacaaagcaaataagaaattaatacatttgagagagctgctggaaatagtttcttcttacatactctgcttataatagaggaaaatatctatgagacatagtacagaacttgggtgatgaagtggtttaagaattatgaaataatatgactttttaaattgaaaaatgaatggctagttggtgaaagagtcaggactagcactcagatcttccagctgcaatcgtctctaccctrtgcattagtgtctgtaggctctggggtgactggggatggagaaagcaaaagagaatcaataaaattaactcagattttttttttctggtgttaccaccaaattccatacttataatactaatgtttacttttaaagtctttgatacaatttaattcctttgaaataatactacaaagaatgtgaatttagctcccttaaacccctccacatttcccctcccaatctttcctcaaattataattttatcacaattttttgttaaatcaacattaatatatacattattataaattattagacctgagccacatagtatgccagggttacatttctttyttttttttttgtataattttgtattccctacagataatcactgccttagctttatctttttttaggttgcttaattttctatctacctacaataatttattcccaaactgtctatagaattataaatctgcaaacatctctggtctactatagtatccttcccatcctctgtatcattgtgggtttatgggggtttttattcctcattggcattttagtgacatttcaatgaggacagatgaacacacgtgctcaatcaatcatatttaaccaggagctagagatgttcattcgtttgtttgtttgtttaagaaatggtctcactatgtagtccaggctggtctcaaaatgctgggctaaagtgatcctcctgcctcaggctcccaaaaagctagggctacaggtgtgcaccaccatgcctggctaatttttaattttgtttttgtagagacagggtctcactatgttgcccaggctggtatcgaactcttggcctcaagagatcctcctgtcttagcctcccaaagtgctaggattgcaggcatgagccactgtgcctaaagatcagtattcaattttgcatacatgaaaatctgaacacagggtcaggcacggtggctcatgcctctaataccaccactttaggaggccaaggtaggcagatgacctgagatcgggagtgcgagaccagcctggccaacatggtgaaacctcatctctactaaaaacacaaaaattagctgggtgtggtggcacatgcctgtaatcccagctactcaggaggctgaggcacaagaatagcttgaacccaggtggtagaggttgcagtgagccaagatcgcgccactgtgctccagcctgggcaacagggtgagactctgtctcaaaaaaaaaaaaaagaaagaaagaaagaatagaaaagagcttaatttgaagtaagaaacccatgtattatatataatatcataatatcagaagtattacaaagctgcctgcataactttcataaatagtatcattttatacacatattgaagtaatcagaaaaagtgcaacaagtagggttcattttgatatttttctttcctgaacaggacaagcagatcactacaattaacacctatcgtgaatttacagggattcaggtagaaaataattcatgttaaacagaggttccaaacatyattaacagagactgagaaattgggccagtatgcatgagagcacatatcataaaggtcatgtgtgttaatgagaaaaagactatttattagcttgcaatttaaatacaaagcccttctccctcaatggcttaaaatggagcaatatcctatacctgaggacaagaaaaggcagtgccctcaattagatgaacaactctcacggtcccaaaacttttattgttgtcactgaaattcatcattctgattttatttttagatagtgatatcttttacgttacagacagaaagcttgtgaatagaacccatcctgtactattgtatacttttttggaagtttaagagactatatatttacttttactcagttgccaagcagcatatttcctaacttttgtgtgtgctccaatcaatgctttacatttgttctgaggtcaaaaaagacaaaaatatttgcagatatcatgaaaaaaatcaacatgtcatttaaaaactaaagacatccatctttggaaactgccattttattacacaatgagaagaaaacaaaagcatggatttcaaaaagaggtgacagataattatgatactgtataaatattaaatgcaattgtgatgttataactactaagaagtaatttaattttctgaatacatatytgaggaatcctacccccaacccccaacctctgcgccaggctaaataagcgaggtaaacactcatgacacaaggctatgcagcattcacacttgaggtcaaaaattccmaaaataaatccataacaacaggtgttatcctaaaagcactgagatgttccccgtgaaagaccaacaattttggatttttaagaaaataaagtagaaatgctctatccaaacacattttttaaaactcaccttgggtcatttcacaaatatttatttcttagcaatccattttcctttgcttataaattcctgtttcactgatttcaaatgaaagaattcttttacaggcacctcttactaaagccaagaaatggaataatacctttaaaaaagataactgtaactgtggaaaggcacagaaagtaaatataaaccacagtcagtgactgatcctccatgagggccatatgaatctcaggatatttattgtgctatctacgtgagaaaatgcattctcattttaaataataacactagtaatctctttgtccattagaaataaaccagtgcagatactgtatattcaaagtagcccatatgcactaatcaatcatctaaccaaagctttaaaatggttagttttctatttcccttattcattcattaccctaccctgtttggaaaactttaaaaaattattatttccatctcagtgtcacagatacactgcaacattgtcaaataaaatgattgtttctggactaacaaaatctctatttttcttacaaggcaaacccatcatgttgtgacaaaacctactacatttactagagaaaagaagagccaaaactatgagcacaaataatacttctctatgtctccccagtatttgacattagtaacataatgtgccagagtttccctgaataactgcaagttcctcttcctacaatacttctgtaaatacacaatatggccacattcaatttaaacttccagttagacaatatctagtcaatgtctacctcacaggaatagtcgtaaattctaggaacatagcagtgagcaagatagatcataatttctgcccttgtggatcttagagttcgaaagtcacataagctgggagtcacatatatttggagagtttaagggagaaattataccttccatagagaagctgatcataatgctcattggtacagtagctcaaatacagtgtgtctatctcagaagtgacaggatcatcctttgtgttcctacagttttcacttctttttcccctttcttactatccaaaatacttacgcttatttaagagttgctgagttaaaacatattaaatccacgggggacagaaattctaggagactggccatataaaaaacagtagacaagaaataagtgaatggattacaatgaaagagatacctcccacaagcaaatgaggattcttgagcatttattcaatagatgtttcttaactatttatgtgccagtactgagtaaacaatgtcgagcaacacacaggccctaatgttactaacagtcttgcaaaggagaaagacattaagcaaatgatcattaaatatataaatacaaactgtgataaatgttatgaaagcaaaacatgaatattgtcttaaaggggcctgatctgaactgtaggttcagggaggatttctctgagaagatattgtctaacctgggagagttgagctaaataggtgcaaagaaggaggaagaaccttcagggtagaaatgtgcatatgytgtgtagagtttgggaaaagcaaggtaggatctacaacaaaagaatatgtctaggtacagtgtggctggaggagaggaaactagagaatatgctgagaaatacaactgaagacatatactcatgcaagtatatgaaatatactaaggatttggatcttcatctagcaagaagcagctttgtgaacatatgcacataagtcaaaagggaatatgtgtagttgcctctgtagagaggaacyatggctggaggacagaagcaggaaggagacttacttgtcactgtataggctgttgtgccttttcaattttatctttgtatgtctattacctatttaaatgaaaacaatgtcatctagatatttaactcactggctctattaggaagaattaattatcggagaccaaacaaaaggccattgctctggtctgggtaggccaagcagcagcagagatagtaagaagttcagaatgataatggatttgataataaaatcaacaatttgttccaatggactgccaagtaagtaagaagatacaataggaacagcatgtaccctagatgagscattaggtgaactcttcccacttgctctcaagtgtcaactgagcatcgcgtcagggtgaatgctgagtctggtggttgcaaagacttaagtaatactaagggactattagaatcatgagccacttcttactaagaagcacaattctatgaagcaaaaacttgggagaaaaacaatgtgtataactcagagcagttaaaaataaataaacaaataaaaacactattccaaaggatgcatttggcaaattgtgctgttaaaggcaaatgctaaaagtcagctattctctggatatgttggctccattcatcattcaacgcccattcagagtaattattgaaaagtatggaagctagaatgcacatatactgacttaggagagattaaaggaataccaacaaaaactaaattttgtctgaaggttaaaaatgaattcagaggaatataaaaataagtgaagagaagttgtaatgtaatatacccacaaatgagtgcaatagctaaaatatctttcagggaactacaaatgctaattaaaaacttataattcaaaatagatggatctgtgctgttcttgtcaatataacatggttttttatgaggaaggaaagaggtgggggagggaggggaggaaagggaggaagggagggagggagggaagattatcttgtttctctgatttcttgctagctttaaaaagagctaaatattatttttcttttaatattaaattccctttcacttatctggatcaagaatgtcttctcaaatcctctctctaatccaagaaaaacactaaagaaaaataagcatacttatagggagtacagaaattgccactagaacccaaatgacagcctgtttgtttagcttagaaccagacctcaaaaactaataggagaacagtcaaacatcttagaagtgcatttccagcagcctaggcagagttaatattaaatgttgcacagaaagcaagagcccctacatcctgctctatcatctaaattgtaaactccacgagggcaagaaccaagtctgctctatgccccgggtcaacacagtaacaggaatgtaaaaagatgttaaaaaaatatttattaagttaatggatgaaaaagggaattaagaaagaaacgttttgaaaaaaacaaatcgatattgttctatctgcaattgaattagatgtgttctggaggcagaagccttaactgggtgccagaggtaacactgagttcgacagatgctgctactactaaatgtatcctccatctcctaacatttctttcattggctccatctttgtgtcatacgtttcttggctaaggtcttggctttatattcaaaataattaatttgttcttcctgtggctccattttatttcagagctcttctatttagttttctactttcacattcacactttaattttaaaagctatttcttattatctgttcctttttcttagatgctaatcttgttttagagactcaatattctctcaaattatttggaagaatttataatttctataagttttccattattccctaactaaattttgtttcctctcaggtcagggggctgttgttgctgccgttgttgttgctgttgttgttgttgttttaaattcagtcctawacattcactgttttgaatcttcctcaaatatcttgtgattgatggttcacataaatcaataagaaattggtttaattaatataaaggtcttgcatgggacttttctgaaattctttatctttcccaacggtttccctccaaaatgagagcattgactgaaagttgtctgtaggcaacagagacttgtaaactggaagggttacatcaacatgcatggaaaaatatgagaacacctgttggcaatatctctaagcagccacataaaaagtgatttatccagtaggtcactttagtgcactcttctctgagacatagctcctttctcctctcattacttttccaccatggagattcagactccttaggctgagtcctctgcttcactctgggcctgaaagcacattagtggctctagccctycatagacagactgttttaattttagtggttgcgaggcaggagcgaccacttctggaatggtaaagtaaggacctccaaaaatctactcctccataaaagcaaccaaaacacaaacaattgtcaaaataaactttttcagaattccaaaagttaaacaaatgcttgcaatgttccaagaagaatttattcaagaaaaatagctgaatcttgctaagaacagtgagctttctatgcttttaaattgctgctttgggaaacagtttggtagttcctgaaaatgttaaaaatacagttaccatatgacccagcatttcaactcctaggtatacaccccaagagtaccgaaaacatatgtctatgctaaaccctctacaccagtgttcatagtaacattattcatatcaggcaaaaaatagaagcagcccaagttttcatcatctgttgaatggataataaaacgtggtacatctatacaatggaattttatttggcaataaaaataaatgaagttctgatacatgctaaaatattgtggaatcttgaaaacattatgctaactgaaagaatccactcacaataagttaaatattgtatgattccaattacatgaaatagtgaaaacaggcaaatctatagaaacagaaagtagaagtagacagtgcttgctagccctagggtagaggaaggaatagggaatgattgctagagtgtgtgcgtttcttttggggataaggacaaatgttctgaaattccatagtggtaataatgtacaactctgtaaatatattaacattcatggaattacgtacattaaaagtgtgaaacctacagtatatgaattatatctcaataaagttgttgtaaaaacatttcagtagatgacagtttttacctggggcaaaaatactatttaaaaaagacatattaaggtgagattattgcaataatttctgtcttttaagcttcacagaggacacttcacagatttatttgcttctacctttattcattctaaaattacttctgggagtataatctcacaattgcaaacagtggatgacatacgtgtatgtgtgtgtgtgtgtgtgggtctgtgtgtgttaccaaatgagtatattagtttatttattgtcaaatgattatactttgttatgaaacacttgaatactaatagttcctctaagtgcttcatgtggaataactcactgaatgttcaaagctattctatgaggttgggactatcattaaccataggaaaaaaactaaaacagagataacttaatgaggccaagatcacagatagagtaaataaaatttgaatctagacaggctggctccagagtctgtgcttttatccacttgctgtgctgctgctgtaataaaaaattttaaagagtacgttaaaagtaatacagtaagtagttatgttgaagacatcacaaatatacaacacagagaagataaaataaaacagaactaaaaccaatcccttcatgttttataataagttattacagcttgggatataatttcagtgataacaagttagaagtcaaaagaaagaagatgtggtctgaaactgttgagtgactcaaaaagtggatctaataatgaaaaacactgatattgaagatgcatgtaaaacactgaaagattcttcatgaaatataagagcagaaaaaagtaatatggttggcccttgaacaacgtggggtttaggggtgtcaacccccatgcagttgaaaatctgcatttaacatttgactccctcaaaaattaactactaatagcctactgttgactggaagtcttacagataacagaaacagtcaattaacacataaataaactagtacttacatatattttatacattcatgacatacctaacttttcttaacttttttgatattgctagactaattggttcatctgagtttattcaaattgttgcaaatgtccaaaaaattttccaacatatataggaaaaaatccacgtacagacggaccccacagttcaaatccacactgttcaagtatcaactgtttatttaaataagtatatgtgatttatataacctacataacaaaattaataaaataaaatgttaaatagctatttgagtcatctacaatgatgtatatgaaaaagtgggagaatcactttatgttcaagattacctttctttgaagaaagaagcaactcatcaaatttttatttaaaacatccaaaaaacaactgctggctattcttataccccgtgaagtaayacactgacagttcaccaacaaatttggatatgtcagggagccaaaccttaacaaaattccattttactttttattttatttccagtactacttcgttttatttgactttgtcatgtctgcctttattatgcagtgacttgcaagaaaacgtaaaatctcaaccatgacatgaaaaccaaatagaatattatgatctctttgtaggtttgacaatgtattgcaatttgacataggggttgacataacccaccaaagatacatgctctctatttttaatttttaaataagtcttgtcatcgtatgttcaaatctttattcctcaagcatctccaagacacagggtttactctcattcctaggctgtcagtcaagggggtcctggttctgcctccctgacaaacttccctcaatagctgctccctttccactacaggcaaatgaacttcctggtattaaagagtacattacctgctattacattaaagatcgtgaaaaaaccactcatcttgacagtacaaacttgcaccaaacctccaactgagtccctgggacagagtctgacagacatttgctataattggctctgccactgagctggcttcacaattcaaacatgaaacaaagctaactaaggagaagcaaggttgaagtgtgttttgtcctttgtttttcctccaagcactcaaaatactcattactatagaattttacgctctcgaagtaaaaacaattcttatataaatatgtaagtgtgtctacagatatacatatgtatatattcactttatggcggaaaatgcaagccttattggctattcttttctcagagaaataagcatgccctactaatcttttttgagattaattttctctttggtctcctagcagattacttcaggttacctgcttttctgcatggcttccatataaccaactgtgccatttcattagccacagtccattcctgatgcctggagagattacaagcactggtggcttttattccataggaaaagctgtttcccaccagagaactgctctgtctgcctgtgttagggtcagaatgttctagagaatactgtcctgggattcttgagcaagctggccagtgtgactcctgtgtaacagtgaactattataagcacttgaaaacagactttgaattttactgatctgtataacatctaggccacctgccagtgtacctgagcataaagaaagttcaatcagcatttgttgaacttaaatagtaattgagaaagggaaggcctcagttctactgatagccatttgggatcatacagtttatttttcattctttttccacatctttaaaatgtctagaaagatctaacaaccagcttacgtgaaatatagggcacagagaaacaggttcaatgaaaatacagggatataatcaccaaaattcaacatgtgggaaactacagcaaaattaacctggtttcttcaacaaataaattgtaatgagagagggggaggaagagagaaagagacagagacagaacgagacagagacataaactgacctatggaattgaaactatatttaagggacataaccaaatgtaaaatgtggacctcctaattttaccaaaacgtaacatgtggacctcctcttttgaaaaaaccaaatgtaaaaaataaacataacatttatgagtcaatcacggaaatctgaacacagggccagatgcggtggctcacgcctctaacaccaccatgttaggaggccgaggtgggcagatgacctgagatcaggagtttgggaccagcctggcaaacatggtgaaaccccatctctactaaaagcacaaaagttagctgggcgtggtgcatgcctgtaatcccagctactcaggaggctgaggcacaagaatcgtttgaacctgggaggcggaggttgcagtgagccaagatcgcgccattgcactccagcctgggtgacagagtttcactctgtctcaaacaaacgaacaaaatctgaaaacaatatttgagattaagagagtactgtcgaagttttagaagtgataatagtataataactctgtatgaatgaccttatccatagatattgatggaaatacttacagataaaaatactatggtgttagggatttgctttaaaataatcgtggaagggagaaaatcggtgaggttattgaagctggaagatgcatacatggtattttactagactcttcactataatttagtatatgttcaaagttttaatatgtaatattaattgctattaattacataatcataatgaatttgaagttttcaatgcttaaaatccatacattcccctccctttgagcacttaatgttaccactgcattaccgttatttaaaccaccttgcctcttatgtataacttttccttaggctcttcctcaattcaccaacagtatagtactcccttttcccactgaatcctgaaaacatctctgttactgcacacatcacattttagcactgcatttgtttatttctcacactagcaacttcttagtagaacaaattttgagaaagaaaatcttaatttattaagcatagtataatagaaaaatagttacatatacccaaagttattcctttgtcatcctccctaataaatgagattacttgtttaagcttcagctcagtccataaaactctaccagaacaaaagcagatgctagcaagatgtagtatctactctatccccaactcagctcctcctcattaatagacaaaaaggccattatttcatcttctccgaagttttactacaaaaataatgtctatttactttcttctaatcccatcttctcactttctctttttaaattattatctatctctactgaattatgagctaacaagaagtaaatgccattcttcttagtattccagaacttaggacagtgccaggtaaatagtggatagctgtatataaatatatatagatgaatgatgaatggatagctggataaatatcaagactcaatgtaatatttttgttgatttttctggttaaatataaatgcaaaaacctgcagttttactgtaaagaattctaaaggcctttaggtaggccaaaatagaatatatcatacatgaggggaaaggaagcatatatctctaaaatagcattttgtatgtttaggagtactgccttatggcaaatagctagttactcaatttttcttttttaaaaaaagttcttaacagaagagtatttaaaagtcatcatgactttgggaattttaaagaagatttataggtattcaaacttcactgtcaataaaatgtcaaagcaaggccttatacctactaaagttaattttttgttttatatattgagacatactctaacaataaacactatgctaccacatagaatcagaacagtgcagtagtttgtcttacaacataatcagtaaatagtataactttctgttagttaataggggtaatcttaactttgcagccttctggattgttaaaggatgttttgatttacaatataaactaaactgggcctatcttttcatggtaaggaaattgaccagtttatgtataaacctactcttgactaacagaaatcagtaaactatgaggccatgctatttttctttacttatactgtacttggaaacatagtaaaagtatctaaaattgcaaatgaaaaatgattaaactcttaacaaacatatatacaacacaggaaaaaaggtactcaccttttaatgagaactatatattttctttatggtagtagtacaataagcacacaaatctccaaaagttaccaagtctgggacactataaaaatcaatttttcattcaatgactgctcatatccattcagcatgaattattgccttattaagtaccagagactttttctccctaactgcacaccccattgtaccaaatctagttagatgaagcagaaacaaattcatatttcctaacacttattcaaattccttggactagaaactgcactgctgagagtcttcacatttcatcaaattattctcccagtaagttttttactaacaaggctctcctgtatcattgcttttttctttttatgaaaaatgaaaggatccccactaatttcacagtacaatgtttcatttattactcaatcttgtttcttagtttattaaaattaaagaagtayatgctctattataccacactattatatttaatagttagcttaaaatgttaaaaataaaattaaaactactttaaagtacctttaatagatatttctaaaacccaactgctttatctttactaactggctagctacttatttcttagatttctaaagtcctgctagaaacataataagggtagataggcattagcattattatctaccatatacatacatatttttaggatcttcccagtgagaattataagcatcacatcagcaaatagaatgtgattttttaaatacaataagaaaaatagcaccaagaaaacccaaacttcaccatgaaaagaacatccctttttaccactacaattgttatattagactttcaaattaatttcagtaaaaagaaaatagtgacggaaaaccaatactggttaaactaactacaagaaggaattttacttggaatgtaagagcctcattgctccaaatcttacttgctgtgaactagggataatcaataaactcttaataacagttcgagtttacatttaacacaagagatggctgcgatctaaaaatcattgtacattagttcggtttcctttctttgttgttattgttgttttttgacacaaggtctcactctgtcagtcacccaagccggagtacagtggtgtgaccatggttcattgcagccttgacttcccaggttgaagtgatcctcttgcatcagcctcccaactagctgggactacagccctgccccactatgctcaggtaattttttaattttttgtagagacagggtcccactatgttgcccaggttggtctcgaactcctggactcatgtgatctcctacaccttggcttcccaaagactgacattacaggcatgagctaccacatccagatcattagttattattaaaattctgctggggaggagagatatattcaaagacgtatgggtaataattttgccttcttccctaggatcaagatgaatatggcttttctgtttctgaatttgttgtaagaaacagaagaacctaaagtttccaaaacttccttaagtggaatgcagatatcattgcagtagtgtgtgtcgttactttggggctggtaatgcaagccttgagaataccagagcagcaacaaagctggataataacattcaactctggctgcctctgcttctggggagaatgtcactggcaactgcttatccactaggaaagagagaaacgaagaaatattcactctaaatatactatttagatcttctctgggtaggcattttccttcttggaataaataaattggaacattagaataggtgaactaagctctcttctaaccaatctcyaagccatttgaaatgccaatgtggtcaataaaaattttttcactagaaagccttgcatttatattcctctgtctctctgtctgtgtatatatataattgcacataaatttccatgaaaatggaaacttgtgtgcattgtcatggaaatttatatgcaattatatatatatatatacacacacacagacagtcatgttttctactgaacaaaaataatatatacttttaaaaacttttcattgttgcataacatagatattgtaaagtgtaaaaattttaggcatagcttcgatgtattttcatgaaatgaactcatttatgtccaccattccaggaagcttcccttacaccccatcccagtgattttgcctctttaaaagtaacaaaaattttaaactctgccattttaactttgcctgtcttggaactcatagagatgaaaatatataatacatactattttgtgtttgacttatttgctccagattatacctgtgagatttatccatgttctttgtgttgtcatagtttgtgccttttcattgctctatagaatttaattttatatctacaagatttttattatttctattcttgacagacatttccattgttcacagttgatttaaaataatactgttgtagacactcttgtatagattttttggtataattacacacattttttggtttggactgtatttaggattagaataggtgggtcataggagatgcttaagttcagctttagactaggctgtcaacagtttttcagagtggttataccaacttacattgccatcagcaccttaaaagttctagttgctccacatcttccctttccaatacttagtattttaagttactttactttctaaatattaaattttaatattcaggcattttgttatctgctaatgttagtcctccaactttattcttctttttcaagactgacctggttactcttgggcgtttgcatttctcccacaaaatcctgttgaatatttaattgggattacattaaatctatactcagtttgctaagtcgacattgacacaattcataaacacatgatatatctttccatttatttaggtttcttttagctttgaaatgtgtgcacaggttttacaaaacttttattcttccttaggtatttgatgactttgatgctaatattaatgtcgtcttttaaaattttcattttctaagtctttcaagctagcacagagaaatacaactgactttgtgtgcagaccttgtatctagtatttcctacatgcttggaacaccagactggtgaagtcttctaggcctgagattttttttctgtgaggaggtttttatttatagagtttattttcttaatagatatgactattcaaattttctactactccatgtgtcagtgatgagaagacgtgattttcaagaagtctgtcaagttcacttaaaaggtgttcaatatcactgatcaacagagaaatgcaaatcaaaaccacaatgagataacatcacactctagttcaaatggctttcatataaaacataaggcattaacaaatgctagtaaggatgtggagaaaacagaatccctgtgcactgttggtgggaatgtaaattagtaccgccactacagcgaacagtttggaggctcctcataaaactaaaaatagaactaccatatgatccagtactcccactgctgggtatatagccacaggaaggaaatcaatacaccaaagagatatctgtattcccatgtttgttgcagcattattcacaatagccaagatttggaagcaacctaagtgtccatcaattgatgaatgaataaagaaaatgtggtacctatacacagtggagtactcttcagccataaaaaataataagatcttgtcatttgcaaccacatggatggttctggaggtcattatgttaagtgaaataaactaggcacgaaaagacaaacttcacatgttcttacttatttgtgagaactaaaaaaacaatgcaactcatagaggtagagagtagaatgatggttaccagaggctaggaagcatattggagaaggagtggggatggttggttaatggacacaaaaatatggtttgatagaatgaataagatttagtatttgatgatagtacaacactgtgtctacagtcaacaataatttattgtacatttaaaaactaaaagagtgtaattggagcatttgtaacacagaaagaataaatgcttgaggtaatcgatatcccatttaccctgatgtgattattacacattgtatacccatatcaaactatctcatgtgccccctaaatatatatacctactataaagcacaatttaaaaaataaaataaaataataaatattaaaagagaaaaccataattaaacagtgaacacattttctggatattattggtgattacacgacattaacttactgtagttgtctgcacaagcagcacaaatctggccccgatgacatcattaaaatatattactattagcactacatttctgtcagaatttttattacagtttcctagcttgtgagctagaaactctcatcccatactctatatacaaaaataatactttattatatttttattattccagaagcaaaaacacattttgttaaaaactcagaaaaatgtaaaataagattacagtattgtttacatgtcaaagaaaatatattccaatattttcaactcttcaaagtactctgattataggtagatataggtagatagatatagatacacatatagagagaatcatcaaagactgttgcataccaaataaactcaacactaatgacagtaaaaacataattcataagggtgagatttttaaattgtataatataatccattatagcacttgcaactaaacactgttcactacatacagaaagtagtgacaattatgccttgaggtaatgatgtgctcttacaattgctaagagtaatttctaaacgaaaaactgttataagatgcaaatttaactttcatccaaaactctagtttttcgaatcacggttttcagttcttttaggacattcccatactcatgggtgctatacaactgtctatgatactgtttctaaacaggttaagaagttatattgcatatacgttttttcaaagatccacaaatacatattgtgttgaataatgtagataacaaatggggttatttattccagttttcttgaattatcaaactgaagaacaaataatttgttctgtgagtaatatctaagtttccattccaaactattcagcccaagcttaatataaaatctaactggaaatcaaggactagtctaacctttctccaatagatgctttatgattagagtatcgatgaaataaacataaccaaaattaaatggagagtcttctcttcttttataagcatatgcttaatatccacatacttattccaccaaatgtcataatgtacctttagaagttctaaactaggtcacataaaattataagtgttttgaaatttaaaatgtttctggcagcattctactaagaaagggtattttcggttcaagttgatgctgatgattttatttatttatttagagacggagtctcgctctgttacccaggttggagtgcagtagcatgatgtcgactcactgcaacctccgcctcccagattcaagtgattctcctgcctcaggctcccaagtagctgggactacaggcatctgccaccacgcccagctaatttttgtatttttagtagagatggggtttcaccatgttggtcaggctgatttcgaactcctgacctcatgatccacccacctcggcctcccaaagtgctgggattacaagtgtgagctcccacgcctgtcctcaggtcgatgctgatgatgtttatactttaaaacatttatctggttgatgtgttttgcttgaaaaaacaataaccttttctgtaatatttttaacttctccaaattaagaaaacactcagccagcaaaaataaattcactaaacaaaaggaaggaaacaaaataaattaattttgaaataagctaactgccttaaatggggaatagaaggcctgtgttttgtttctaaattttttaccaatttgtcatgaaggcttacatgaagaaatgaactcttagacaagcactgtccaacagaaacatcaggtgagtcatatatgtaatattaagttttctaacagacacatttaaaaaggaaaaaaagtgaacttttgataatatattttacttaatatacctcaaatattattacttaaacatgtaatcaacataaaaagtattaatggggtatcttacattcttttttttattactatgtcttcaaaatacaatttgtattctatcctagggcacatctcaattcagactagctgcatttcaagtgctccaaagctaatggtatcaacttgcacagtgcagcttcacacttttggttcttcacttactaaatcatatgattcttaagggtattttagtactagttttgtaaaattctaatcgtggttaaaactgatcagtgatgagagatgctaaattcttcttcatcccataaatatgagcaaacacaataaatcagtattaaatatatccaaaaaaatgcaatagcaaaatacaggcaaatttcatttatgtaatttatgaaagtatgccataagtatgtttgtattattataaataagttatccaaaaatattataacgctataataaaatgcttcagagaactgctatacataggaaaaaggataaatccsactaacaaacctttgagcagtgtttttgcttaggtttatacatattagagtagtctactgcaatttctatagatcacatatgcagtttacaagaagcctgtatggacactaaaatttaaatcatacatgttttaaggctggtatggtgagtaagtcattttgcatataagtgagtaaattaattaacatctatgactcaactggctctttactctttatcacatatatgttgagtactctctgttaaaagtttaatgacttaaatttttattaagatagaaggctataaattcatgagctaagtatgtcatttaggaagttagacaatgagaaataaagtaaaaataaaggtaattgaaaataataacaaagatatgaataaaaattaaagaaatataaagtaaaagtaaaattaaaaaatataaaataaatataaaaatgaagaaatataaaatataagataagattaaacaggaatcacaaaacaaaaagttaattctttgaaaaaacaaagaattcagataaacttctgacgagtttgaaaaattaataagagagccaaataaatattagaaattgaaaaggtaacataatcagagatttaacagaattaaaagatataaaagaattctgtgaataattatctgccaataagttgaaaaaatgtcattaaatagaaatatctttataaaatatagtcgatctcaacaaagaataaaaatacaaataaatatacaacttttaaataaatggaattatttccttaaaatctttccataaatacaacagactccgagatttttaaatgcaagttttatcagactttcaatatccaaagcatttcaatcttatatttttctagagaatgagggagaagggcatggaagggaggagtgatttatttcccaactctatgaagtcaatatagctttgacgacaaaacagaaaatgacaatagaacaaaaaataatatgccctcttactcatgtatgtatatgtaaatatcccgaacaaaatgctataaaaataaaatccagtgatacataaaaacatttctactgtttgactaagctaacttttaggactacaaggggattataattaaaggaactataaatgtcatttactatatcaacattctataagaaaaaattataattatctcaatagatatagaaaaaagtatctgataaaactgattactcagttatggttaaaaaaatagcaaatcaggaaacgaaaaagatacccaaaataaccttcagtaatgatgaatgttttaggtatcctatcatggtatattcaaatttcacaaatgcttcagagcacattcctcaaaattcaaggatgtgaataataagtatgctaaacaagtgtattgtatggagtaacagtattaaataccaatttgctcaaaatagtagcgaacagacttcaggacattcattatctacaaggtttttgatcctaatgaatgaaatgtctactgcaaagaagcaatttattcatttcattataaataattttattgacaggacaatttttaagacaacctgacaaactaaaatgtctccacttcaaataaagtatccaacatttaaaaaaaattatattacgatatgctttaaatagaattctgatgctgaactccgtaatatgtgagtatgtgtgagttaccacttgtgtttaataactgttagatggctaatgttagtccaaatgacggtctgctctggttaacacactaaaattgtttatatcaaaatcagaaaatcaatgattgcaaaccaaaccaaaagtaaggtcataccagtagtttttatatttattgataaataaattattgatcgctaatatgttgttaaaaattatgtcttttacatctccctaaatgcattacatgtatgtatttccaatgagtttttaaaatgtccaagacatgaaatttaaaagaatcttgaagaaatttattaaacactgaaatttgattataattttacgaatttattcctgaactcatctcaaggagcaatgacctcaggtaaacacgcgctcttagagtcatatgggataaagaagtctggcaagattaaaaagggaaaatgtgactttttaaatgacaataagtataacacaaatatactaaagttcataaaaatatatactacagtcatcaaatgtagtcacctactcagttcagggagggcatatcctccacagggattcatccattctccattttaaaattgattttaactttacagaaggcatgtttgtgaatcaaggaggattccagattttgagcgagtagtttttttttttttgccccattgtgtttgccaagccccattgttagataaaatttccagctagaaggtatgctcttgccaatgactttctcctgaccaaactcttgtcagaatcctctgatctccgcttgactaagcctcaaacttggtggataaaaactgcaacctcttcccacaaatgattttgtctagacacccccgccctcaccaacataaacactaagagacttgaacaaacactaacatagtttctaactgctcaaggccacagccctaggatgaccccatcccaccttagagcgcctgcctgaaaaaagctcaacactgccaggagaacttgctgtttgtttcagccccaaaccagataggcccctgaaccctgctcttatagagcagttgctttagaaagcttgcaattataaatgcttttttgccctttgggacaatctgctaccccaaactgtttcctcaaggacctgagcgctctatgagatgcaaacattctgggagacaactgtcactctcactcccagaccctgtgggagttaaggcccaacttcgagtgggcaccttgctctaataccattgcctcctgtcataaagatagattgcttctcctctggagaggcgtcaattaacaaacccacgtggcttcatcacatagaccaaccccttaacacccctcagtgccagtccctggcctctaaaaagtctccagctttttgttttggtgaagttgagttcaattcatgctggactcacttccctactgcaactatttattaccgaatcaaatctctcctcagtgctttaactagtgtctagctttgtttatccttgacactctgaaaaaaagttgataatcccctaactgtcaatattctggaagttagtctcaattctgtcatctgtatgtctctgccttgtcatagaacattaaattaaaccctaagtggcttgtgtggattggtatcagttggaaacttagctggtggagtttcatgagctttagatgagggtaggaagggawaaggggcttgatagattttctataggttttgtgtgcagcgcagccagctagacttgagatgcagtggatgatgccccaacccagggactctccaagggaaggttttttagggaattcggtctataatccaatagtctgatatctcttattgagaatgtctttgttctaaagtaactcagctttgctatatctcaggggagactaggctgttgttaccttaactacagatgtaaagactagaatagatggggaggagaccaagaaggagcttttcctactatactggaacaagctatagcacaaaagatctgaaatagctgtaagaagaaagtactatgcagtaagcagaacataacatttagaggattaaaaacagaacactggtaaaggcatagtatgacaatagttataaaaagggaaggaaagtaggagagggggagggagaaggggagggaggggagggaggagagggagagaggaaggaaggaaggaaggaaggcaggaaggcagaaaggcaggaaggcaggcaggcaggcaggcaagaagacaggccaattggccaacttcagacatagtattaggtcggcgcaattacttttgcaccaacctattgcagggagtgctgacaacaaggtagagctctgggaaatcaaaaagtgacagaaagccagctagaaagacaagtaagcagcagagggagtcctgtcactaagtggatgggacccattcacaggacatgttgtgaggaagcactgggtcactaggacccattcacaggacatgttgtgaggaagcactgggtcactagggaagtcaccataagctcagagattgacaccagatggatttaccaggaatgggatgaaagagtggagtgatcccacagcaagacataaagagcccagttatcaagaacagggtagtgatacaacagtacacagtgacctaataacgctgaggcccagaaaactggatccagtttaaatctatgaactttactatcagatgagtcagaaaagcaaaggaagggcataattaattataggaatcaggccaggctcacaaacatagcatctgtcaagttttgaagtcacttaattcaaacaaagatcttggaagggacatgccattttgtcattttgttgtgagctgattaaaaaaaattttttttgctaggttatttattgttttgggtgtggtttttgtagctttctttttttctaattattttttactgtagagaaatacacatagcataatatttactatcttaattatatttaagtgtagcattcagtggtatcaagtacattcacattgttctgttaccatcaccaccattcatatccagaacttttttcatcatataaaacagaaactctgtacccattaaacagtaattccacattccacactccccacatccggggcccctggcaacctccattctttctgtctttaaggttttgactattctaggtacctcatacaagtaaaatcatactgtatctctctttctgtgactggctcatttcacttggcataatggcctgagggtccatctatacagtagcatatgtccgaactttcttcttttttaaagctgaatgacagtcaattgtacatatacaccacactttgcttattaattcatctgtcaatggatatttgggttgcttctgcattttggcgattctgaataacatgctataaatgtgagtatataaatatatcttcaagaccctgctttcaattcttttggataaattaccagaagtggaattgctggatcacagggtaattttatgtttaactttttgaggaaatgccatactattttccacagtggctatttattttttaatgcatttaagctattttactattttaactgatttcattagtgttttgcttatttttatctacttattttatttaaaagttcagttttaaaaatcgtgatttacttgtttcaagtgataacaaggaacaatcaggataaggataatagacttgtgataagcccttgactgaagctggggttaactctacaaacaccttcacagcaccaaaacaaatctcccatactcattctgggtcatctcttggctcctaggaaaaagactgacagcatcttgagatcaaattgcagctctgccttctaccatttgaaggccaagcccccggcaagttatcaggattatagtgcattctcaattaatataggttttgattaatattaatgattgctctcagccaatcagcagagactaagactgaaatttctctcataagtgagtgatatattcatcctcaaagagagctcaataacctaactaggattgtgtcatatcatttcgaagaatatttagtccttaattataatcttaaaatgacaagaaaaaagtagcaattcatattttaaaattatttcatttaaaccccatgagtgaggttaataataatggaaggattattatctccatttcatagattaagaaattgatgcttagatgggtatcttgcctagttaattagtgacaaaacctgactctaacccaggaacttcaataaatgaaatctatagtctctacatagatttaaattctagacaatcaaaatctagtccttaaactgtctatgaagttcttatccagaagtataattatttcactaagaaactaggattcctcccaccctggcctgcttgaaagtaaactttattatttattatattatactctctcctatccttttaaataatgtcttaagttacataaaaagagaagcaaatatactttaacaatcaaggagcacctgggatttcagagcttccttcccacaagtggcctccattaccctaaggtagtgccaactgcagaacattagagttggttaattcgtgccccacacatactgtattagtttcctagggctgcgaaaacaaagcactacaaactgggcggcttccaagagaaatttactctctcacagttatggaggccaaaggtctgaaatcaaggtgtcatcgggctacatttcctccaaagtctctggggaagaattcttccttattttgtctaatttctggtggttccagtcattccatggtttgaggctgcatcacttcaacctttgcctttattttgcctatccactgctttcacctcttctctgtgtgtctcttctgtgtctccttcataaagatacctgtcatttgatttagagcccacctggataatccaggataatctcatcttgaggtcctttaaattgcatctgcaaagattccttttccaagtaggatgaaattcacaggttctgagaaatggacacatcattcggagggggggcaggtcaccattcaacccactacaccacagaaaaacccaacactatcacaagcccatgtgaagctgttatgatgcatatcacttggcaatgttctaccatttagtctgatctcttatttaccactttacaattttcccatgtgaggggacttgatctgaccacgtcatgaaccacacctgctctcatcaaagcctgtctttagatctttcctctgattatgtccaggaatatacaatttcagctacttttgactggaccctaactaactgattatcaccatgctctgttctggactgtttttatgggttccctgctgactccactcatcaaccacaaatccaaaacatttctttttcaccataaagaagcagtctgctctgcgaaaaatgaccatacatcccattttgcacaaaaccttgctggtttacctgatttttcagcatacttcaagctcaagattatatgcacatcctaactcaggtgcccctcagcttcaaaccaaataatatcagaaggttaccaactgaaatcatattaccccaaactccacaaaacaaatggattgttgcagtttcccttacctttagtgtattgacgaacatgcttcccaatgactaaattatcttcaccgggatataatataagggagaatcaagtattaggcttactctctaatatccttctaaggatttaacatcatgtgcctcaaaaatagctggtcctaagaacacaacaagagcctgttgtgtttactcggaatcctcagtaaaataatgttgaaagaaagaatggctgtagtgatttaagttaacatctaagatttggcttctgagctattgggtatatgcaatatgaattctttcatgaaccggaataataccttttccattaactactctgcttattttttttattttgcagatctctgcctaccaacctaggtgttgttttgttgttggtgttgtttttacacttgaaagaaacttagagatttctacttactttattcaaacagtaaaatttttgcataggaagttttcagtcttaataaatttcattaaggtctatagaacactggaagtatgtagctttgtggcaaaattcgaaacttgattttctgctggatatgttgtctgtaaaaatggacttaattttgagtgttaaaatcacttataaatatgaatttaacaatttgaaaaaatgatttgcaaaaataatccaattatttgtgattgttttttacttgtgggctttaagttctgttttttttttctacagacctgaacctttgcttttatttgagcattctaaactcatttagctggaaaaccaaattccccgtggtcccattatgtacgttgctaagcaaaccatctagcagcatctataaacaggaggtttggatgtgagccagtcttataagttgagagtaggtcagtgcattttaaaccagcacatcattaatgaagaaaggtgtcttgctgctaarccagtttatattttttgggggcaaatatacacatttattgacctatgctaaattgattttgcttttttacccctgcctttgaagcaccttccatattgctatatagattttacttaacaaggacttccctaatttgaaaaacagatctaaagataatcttaaagctctacttgtatacttttcaagcaaagctgtataatatactctatcccttccctacattctttctgtaggaaataatttgtcatgagtaaataatctggcctttaaaactgacactaaatggaaagatgctatggcttttgaaatgcatattagatcatctgttaccaaattaaattggtatcagtttgcaaggagtaccataagaaagtactacaaaccgggtgccttaaacaacaaaaatttttgtctcagtctggaggcccaaaaacaaggtgtcttcatgtaatagtgaaacagcaaaagagttatgaatattataactaactccatttttgttaaggggcccttacccgattcctacacataggcaaggataattttagaacagtgaggtaatttgcaaaaacagcaatcatgtagtttttaaaagtaacgctgagattaaaggagaagtatgtatacaactatatattttgttaaagatttataggagcattgtgacctgaccaaagaaaaagacattcccaacctccttggaccctccctggagcccagatgcctgcagtgcagtcattagttacctcttgatcccaattcccaactctttctccttcccttcacttaaaaatagcctgaaatttgtactgacttaagatggtacttcaggacgttaatccaaaattttctcagttggctgattctgaaaaacctgcttctcttcccaccaaatctcatctctcacatttggtttttgagcagtgaacaaccaaacttgagtttgggttacattcagggttggtttcttctgaaactaggtttggttacattcagcgttctgagggagaacatgtcccacgcctctctcttgctggtggtttcctgacaatgacaatctttggtgttccttggcttgcagtatcgtaactccaatcttcccatagcatttgccctgtgactctctctctgtgtccagagtaccctgctttataagaacacagtcatactaaattagagccaaccttaatgacctcatcttcatttggtcatctgcaaagacctttccaataatgtcacattcacaggtactgacaattaggacttcatgttttggggagacacaattcaacacataacaaaattcattcatgaagaaatgtcacagactacactggcacaccagtatttctacatttctatcagatccagtggttctcttcttttattgtctccttttgtttgttgttcatggtggtatttggttatttaacttcctatattagattttaaaagcacccacgttaatccggtttcacaaaagatatgtagatataaaaatgatttgtaatagcacatctatattgctgatgaaatacattcataagctgttttgtctatacatatgcatacattcaagtaacagttgaaactgctgaaactatgtcagtatattttggcacatattatgaattgccatttggaagaaaaaaacccaatattaaaaatcttttcttataaaagaatataaggtctctctctcgttagtcttgttagtattattttttctcccctaaggaaatccaacaattatgttgggaaatcaaggcaaccttcaaaccagggaatctagatgtacaggaaacaacaggtagattggcaaaaagataaaggccaatttaagagcagaattaatttcttctgcagtgaccctagatcaccacagaaggggcaaaagtccagaacaactggcagtaacataaaatccaaaaacacagttgtttgaaagatggctgtagccagaataggagcccacaatacaatagtttaggccaatacccttaagaaataaagcctgtggcagtcatttccagaagaaattgatagcactggaagtggacttagagaggtagagaatgtgaccaaaaggttagccctagaaaagataatcctacaaatcgacacatctcctagaatgtcaaaataatgaggtctgagggttcctatcatctccctagctcccagtttacctaaggtatacatcatctgtatgttttccccatacttgaaaagattcttttttaaattttttaatttttatagatttaggaggatcatcggcagttttgttataagaatactgcatagtagtaaagcctaggcttttagtgtacccattaccccaacagtgaacaacagtacctaaaaggtaattttcaaccttcattctccttgtgcttagaaagattcttaaaacagaaatatgaggcttgaggtatgtgatcatagtatataagaacacagtgtttgtgtcttataatcaggttatatgaatagttctaattgctcagaaggcaagagaaaactctgattgtgtgtttgattgtatttcataggtttacttttacctctgagaaatcagtataaaaatccaaaatctgtataagtataaagtgatgaaggcaatcagcttttcttcatgagcattcttagagcccttttctaaaagaaaagtatgcatgcaagatacacacacacacaaagacatacacagagaaagaggatatgtggtgcacaccatgtggcatacatttacattttaaattatcatgaattaaattttcccatgaggcctcaatattgtactacattgaaattattagaaactcactagggtagcataaaatcaatgttttgaatcattgaccacaagggaaataatatttgagcctcctagttttattaatatcacaataactatttaaatatttactctaaaagcccaaagagagagaaagaagcattagggaacaacctgtataatataaatcatttaaagctttctcacctccatgatcaaatttcttttgcctcaaaagaaaacatggcaaaaagaacatttatgaaaaatgtattacataaagttggatacttaaagattatagtcataatgtatacagtaaaagaatccggagggaaaaaagattaatatcctgaagaaaatttaccaacattctaatcagaccaggatttgcttagaacacatctgagggtgctccttagacaagaaggaatgtgaagaatgtttcttttaaattattactctgctgcttaaaaaaatgcaggtagcttacactaacagcagatagaactgtaactatctacatatatgtaatataagtagatgtataataggtaaaaaaagataaaataaagaattaaaaatgcaggggctaagtaataagatgtggttagggggggaagaaaggaataacttgaaaaaagaatgagtggaatattatgggtttgatgaaatatagggcacaggcatttggtaatttattctctgatttaacagaaaacagcattaatctcaatcaaaaaagtagtatatgcccagaagaatttcttcaatattgtgaatctatgtatagtcaagactacattgtgaagataaataaatcacatttgtcagttgctaaacctgtttgctaaatggtataaaatataagggactttcataatataaatatgcagtacagtgctggttcctaagcagactgcactcaacattgagtgctttcgagacataagaaaggaaacttaggagctttatttattactgatattatattcattattaaatttaaagactggaacactctatgatttcttctttgcttttattattattttaattgatacataataattatatacattcatggagtacaatgttatattttcatacatgtatacaacgtgtaatgatcaaacagggtattcagctatctatcacctcaaacatttaccatttctttgtgttgagaacattcaaaatctgcttttctagctattttaaaatatataatacattgctgctaattatagtcaccctatcgtgctagggaacactagaacttattcctcctatctagctgtacatttaaatccattaaccagcctttggctatctccttcttcccctttccttcccctcctcaagtaaccactattctactctctatttctatgagatcaacttttaagctttcccatatgagtgagaacaggcagtgtttatccttctgtgcctggtttatgtcatttaacctaatgtgttgcaagctcatgtggagttttatatgtcatattataaaagcattattaaaaggcaacctaccattaaattaattaaaatcaacttgaaattggcaaaatggcagagaactcatggtataatggtggaaaaaccactgtgccgataatctatgtaatagaactactattttctgtatggcaaagagagaactgtaacctgctgagggactgctattgcaccacatgctatagacaaatgaacaatacatgaagtcagtaagaattccagcaaagaataactgagagtttaggtcataaaaagccccaggagattctaatttcctagaagtagggctttttctcaaacattaatattactactgaagtgttgcagtcattggaagatttttaataacttgaattttctttttcaaaatttaacattattagatgatgacatctaaaacctcagactctctttagatgaaataaaattattattctatttttctgataaattaatttcctaaaaagtgatttctttaaaaaatcattgctaaaacaactttctacctgaaaaaaattaattaacaatacacaattttaatcacctgaatcactgaatcacttgtgcacacttggcctctcacacccgttctgtgagctacttagtaaactttctaaagatgctgagaacgttaagttagtgtctacccaataaaggagaaacactgttatgagagtgtatgaattttatacattgcctgaatctactggttacaaccacagtggtttggaggctatacactcgttctttttctcaagtttggtaaacagttaactataatttgtatgtccagactcaaagaacaacagtgaatgcatttctggagtaacagtgtcatttccaatccctagtaaaacagcagatataatcttcctcctggggtgtttcttatattatcagaaaaacacactagggctmataacagtcctgtaaatgaaaactaatcagtcacaggacatatcyagaaaatgtagrtaaaatatgaggaaagaagcttaccatcattgtaacatttaagaaaatcacaagcaaatatctgtcgttcactgttctgttctaaaatttcaaactgttgttctaaaagtatctacagtgaagttaaatatattaacaatgcttactgagtttctctttcaaaggattgtcaacatcaacccttctcataaatgtgagcctcctcatgggcatctatttgtatggaatagcatacttcaattttcactacctgccccatatcataaagaaaaattatacacatacacatactcatataagaatattttttaaaaccgtgggaccctggtctcagtttcactagaataatactacaatcatcagtgaactggctataaccacagagacttttactatttcacaactgaacaactctaaaagtttcagtcctttaacatagttaatctcaatgcatacttacaaatgagacaggcaaggcaggtaatacaaatcagaaagctgaggcagatagaggtttaataacttcctacagctggcgagtgtcaaaacctagtcttctgactcctaattcaatgcatattaccatacatacacacaggcatatttacacgccttctgcctagagccacagtctatatttttattgtatgttttatattttcagctcctacctcactcaatgcaaaaaaaatattaccgaatttcaaggttcagagtggttacgggaaatatacagcctaaatcttctggcccttgtttgcttattcttaaatttcatgattacattctccctgcttcaaaaaattctattaccgtatgaaaaactattmaccagccttctattgactctagtaaaacaattattgaaaaaaggaacagagtcccataaagcatgtgcatggaaacaaatataatcccttcttggcacagatgcacaaactcaaattgctgagaaagaatctgaaagatattctgaaatcaatacttgtgcagtaaatggtcgaagaaaaacatgcaaggcagaagagatatacatataacactcagcattaaaagaattcctttaagtgggctagattttccaataaagaatataaagccaataaatcaaacataaataagtccctgrtggaatactaggcttacaatatgcacttaataatttcttagtaccattaaaaacctttacattttatgaaagcacatactgaactctattaaactgaaaatgatttcttttgaaatatatcagaaattaagtggaaaatcagaaaaaactgctgttttcagagtcctcgttgcattatgtattccggctttatgcaagaagattaggattaattacacagcatcctaattactgtctttcttccatttctgactcatttagaatgtgggcaagcagatggccaaggaaaaggtcttacaataacaggcagcgttttccccatcttagcttagccacattcaagaagaaaacacaagtacctccatcattcctaactataaactataagctcactgaagttcaatgagactgtctattcttttaatttctaagtaatacaatatgtacactttttagtaataatgtaatatggggggtaggagagatataaatacagtccattgtaggtttgttatgaagagaaatctatgtttatgcaaaaatacayattccattagaaataacaggattcacaagatcagaaattatttcaagaaatataaattttatctacaatgtggaggtttttttttaaatagtagaagaaggaaaccaggcccctatttctcaccatgtacaaaaatcaaatcaaaatggattaaagacttaaatctaagacctcaatctatgaaattattacaagaaaacattggggaaactctccaggacataggaatgggcaaagatttctagagtaataccctacaatggcagaaaacccatgcaaaaatggacaaatggggtcacatcaagttagaaggttcctgcacagcaaagaaaacaatcaacaaagtgaacagacatcccacaggatgggagaaaatatttgctaagtgtccacctgagaagggattaataataagaatatataaggtgatcaaaaataggaaaaaatccaataatctgattaaaaatgggcaaaagatctgaatagatatttctcaaaagaagacatacaaatggcatacaggtagatgaaaaggtgctcaacatcactgatcaacagagaaatgcaaagcgaaactacaatgagataacatctcactccagttcaaatgactttatctgaaagacagacaataatgctggcaaagatgtgaagaaaaggaaacccttgtgcactgctggtgggaatgtaaattagtaatgccactatgtagaacagtttgaaggcccatcataaaactaaaaatagaactaccatatgatccagcactcccacacaaggtatacacccaaaagaaataaaatcagtattcaaagaggtatctatctgcacacccatgtttactgcaacattattcacaataatcaacatttggaagcaacctagatttctatcaacagaagaatgaataaagaaaatgtggtacatatacacaacggagcactattcgactataaagatgaattagatcctgtcatttgcaaccacatggatgaacctggaggtcactatgttaagtgaaataagccaggcaccaaaagacaaatctcatgttttcacttatttgtggaagctaaaaaaattaaaacaaatgaactcatggagatagagagaagaatgatggttatcagagactgggaagggtaatggaagctgtgagtgtgaggatggttaatggatacaaaaatatagtttaatagaatgaataaaatctagtatttgatagcacaaaagggtaactaccatcaacaataattaattgtacatttcaaaataactaaaagagtaaaaatcatttaaacccattcgaaccataaacaaaaaataaatggtgcacagtgtggactctcttattacctatagcttctcaatgatcttccaggtatgaaatgccatttacttaatctagtttattttctacatgtagtataagaaagaaaggaaaatctgtgtcccttaatacctttctttctgcataattcttttcttcctgaatatacacttcattggatgaataccagtcctcaagtttaccagtaaatgttgatgaaaaaaaagatagggaaaatgtgaaatcttgaaaaagtactgcacaaaaatattcttaacaaaatggtcaaaaaaagtttaaaatcagcacaacaaacacttgagtagattagtgagtttcacaatgccctgcttttattttttcatttttgtttttatttttgaagactgggtcttgctctgtcatcgaggctagagtgcagtggtgctatcgcagttcactgcaggcttgacctcccaggctcaagtgatcctcctacctcatcctcctgggtagctgagaccagagatgcatactacatgccagctaattttttaaattttttctgtagagatggggtcttgctatgttgctcaggattgtctggaactgctggcctcaaacaatccttctgcctcaggctccaaaagtgttatgattacaggcattagccattgtgcccgggcttccccacttttgaaaaatcgattccctttcctttgaccttctctcttataatgattaaactttgtcctttaaacatctccaaatttaaaaactgtatcaactggaataatagaatataaaatcaaagaatagtcagctttgatatttacctacatgtatagatcttttagtccatgaagcaactagaaccattgttattaaggccctagaagataacacacaagtttaatttaccaagacaagcctttgccctaaaatgttcccttagagttgggtacatgtgacatttcttttattcacatatagaaacatcagatatgacaggaagatggggttggcagctttatgtcacaaagagtgggaacagcttacaaggtacttgttgtcagagggcaggaagttaaatcctggcttccacattccctgtgtgccttttcctgggtattcattttttgttttattataaaaatgagattaacttgatatttgaaaaaagaaaatatcaaataccatgtgctcaaatatgctaattacttttcacattactatttcttactagctaggggacatatacatacttttaagaaccagcaagcatttttctactgaatcacagaaccaaatacaggcgtaccttggagatattacagattttgttatagatcaccacaataaaattaatacagcaataaagcaagtcatataaattttttgttttcccagtccttataaaagttatgtttacactatactgtactttattaaatgtgtaatagcattatgtctaacaaagtatatagcttaatttaaaaatactctgttgctaaaaaaatgctaacaatcatctgagcgttcggccagttgtaatcctttagctactagggggtcttgcctctatgttgatggctgctgactaatcasggtgatggatgctgaaggttggggtagctgtaacaattttcttaagaaaaccataaagtctgccctattaattaactcttcctttcatgaaagatttttttgcagcacatgatgctgtttgatagcattttacccacagtagaacttttgaaattgaagtcaatcctctcaaaccctgtcactgctttatcagcaaagtttattaaatattctaagtcctttgttgtcacttcagcagtgttcacagcaacttcactagaagattctatctcaagaaaccactttctttgcttatccataaaaagcaactcctcgtctgttaagttttatcatgagattgtagcaattcagttccatcttcaagtttcacttctaattctagttctcttgctatttctaccacacctgtagttactctctccacttatgtcttgaacccctcaaagtcatccatgagcattggaatcaagttcttccaaattcctgttcatgttgatattttgatctgttctcatgcatcacaaatgttcttaatggcatctagaatggtgactcccttccaggttttcaatttacttttcccagagccatcggcagaatcattatttatgatagctagagccttacaaaatgtacttcttaaataataagacttgaaagtcaaaattcctctttgattcatggtctgcaaaataaatgttgtgttagcaggcatgaaaataacattaatctctttatacatctccttcagagctcttagatgaccatgtgcattttcaatgagcagtaatattttgaaaaaaaaaattttatctgagaagtaggtctcaacaatgggtttaaaatatttagtaaaccatgctataaaccaagcttgttcaacctgcagcccacaggctgcatgcagcccaggacagctttgaatatggccaacacaaattcataaactttcttaaaacattatgagatttttttgcaattttttttttagcctatcagctgttggtagtgttcgtgtttgttatgtgtggcccaagaccattcttctttatccagtgtggcctagggaaaccaaaagattggacacttctgctatgaagagawgtgctgtcatccagactctgytgttccctttacagagaacaagtagaacagatttagcatcattcttaagggccctaggatttttggaatgggcaacgagcattggcttcaacttaaagtcatcagctacattcgctcctaacaagagagtgagcctgtcctttgatgctttgaagccagcattgacttctctctagctatcaaagtcctacacggcatcttcttccaaaacaaggctgtttcatctatcttgaaaatcagttgtttagtgaagccaccttcatcaattattttagctaaatcttctggataaattgctgtaacttctatgtcaatacttgctgctttaccttacacttttatgttacgaaaacagcttatttcctgaagctgtcaggaatgaactaacttttgctagcttccaacttttcttctgaaacttcctcacctctttcgggcttcacagaattgaagagagttagggctttgctgtggattaggatttggcttaagagaatgttggggctggtttgatctatccagaactcccaaactttctccatatcagcaataagactgctttagtttgttagcatttgtgtgttcaccagagtagcacttttaatttccttcaagaacttatcctttgaatttacaacttcactaactggtacaagaggcctagcttatgaactatctcaattttttacatgctttcctcactaaaattaatcatttctagattttcacttaaagtgagagactcataactcgttctttctcttggacacttagaggccattgtagggtcattagttggcctaatttcaatattgttgtgtctcagcaaataaggaggcctgaggagaggaaaagagatccggaacctgccagtcagtggagtagtcagaaccacacatttgtcaattcaacttgccatcttacatgggtgaggtttgtggtgccctgaaacagttacaacagtaacagcaaagattactaatcacagatcactacaacatatgtaacaaaaaggaaagtttgaaacactgcaagaattaccaaaatgtgacacaaaaacatgaagtgggcacatgctgttggaaaactggtgatgacagacttactcaatgcagggttgctacaaacctaatgcataatacagtgaagcacaataaaatgacataagcctacaataaaattgtgctgaaatgactgtactttctaattacttttcatgcattcacacgtatatrttgacaaagcctatttttaaaattcattttggctgtttatggaatatgtgtttcattttataaattgagaaaaaatttgacagactgtatattaggtttctatgctgtttcctggatacaaaaatatgattccttaaagtaaatctagcaatattaaaataacatacattacagtgtttacttgattctattggaacaaggaaaatgatattaatttttataaccaccgaatattataccatatttctatactyttactataccattattactatgttattttaccattattacattattatcacaatacataggcctatttaaatataattaggagtctacattacctgatgttcttattactatattgtttttgttgccactaggcaacttgcacatatgtttaggagccacttaatatgaaagatttaacatcactgagcctaatttcctctgctgtgtggttggctggagaataaatatagcaatatcttcatgtgactttctaaaataagaatggataatatttccccaaacacataacatgaaacacgcttctaatgaataatcctatatctgcattttacttatcactattctgctattttcttatttgtttgtttaatagaatgtaagtaatgtccatgaatagggatcttccctgtcttgttcattattaccatgttctaaataatgtcagatgaatcataatttaacaaatgggtaaatcctgtatttgagcacccagcttgatggagaagctctggccccacatatatagctactagttggaagcacagcaatgaatataaactcaaatgaccaataagaggaataaatgaaggttctcttgccctaaaatacaaaaacttgaactttccaattttggaagcagatactaagataaatgtscaggttttatataaacctaaacaaatgaccagcatcatttaatctagttttatgccacaaacaataacaaaaagttgaccgtaactattttcaacggcatgataaaagctaacacaataataaagtatactaagggtttcttaccattgtttccacatttctgcttacttcttacggctaaaataaatagctataaattttgtagctagctcatctgtcagtttagatatgctcaaaccttgcttacatatagaacaagtgttgaataaaattattgggcttcaaaagttttaagaataaacatttcaatatatgcagccatttcttactttaataaaaagaattaagcataaaaagaaataaaaaacataaaaagaggttttaaaatgatctttcctaagtgtcagaagagggaataagtccatggaattgatacataaaatgaagactcttactctttttcttcctagtgccattcttagtataatcaaatctatctaactgtccatcactttaacatcatcaggactcaatggctcagtatgctcagtggaactctggaacaggattcccacttacccggctaataataatgctaatgaaactaaatccatagcttgttttctagtttctattaccttcaggtatttaccacttctttggtcctatgaaaactaagaagagcagaagctgtcccaaggtctcaaaagaatttggttgtagaggagccaggttgcctcagagcccagtccccgaaaactccatgatgcattccactcaaaagaatcctcagaccttggaaatctcaagaaagcactcagcttggggtcaagatagagtttctcagtttatttatcaactgaaaatgacaaaaaggaagacaataagattgaaaaatgagaattagaaaagagagtacaaagtacccaccgaaatttttttcaagtggtattaaaaaaataaagaaagtcaatcacgtttctcagagaaaatacctctgaggtggaggtaagaatgtgatgtgaaatctaagggagtcatgatttcaagaatgaatttagttgcaaataagaaaaaaatctgatcctacagatatatggcacaatgtaagcagagacacgcaaaagaaaacaagagaactcaggctagtttctaaatagtttgggttctctcaagtgcttatgtaaattgaaatttggaagacagcgattcactaatcaaatcaacccttaatttgtactatcattggaatgctaaatcttacagacatagactggcagttttctcttaaattggtgccttgctagattgcataagcttttatattcatgatcatttttaaagtttaagtattatttatataaagtggttaagacatattaactatttacaaatgtatcttaaatgtttattttgtgattgtgtctaaaccaaaaaatgaagaaaggccattatgttctgcttaaccccatgatgcctgcaaactgaagatgtgatatttcaaataagtaagtaataatgcataaacattgtgtttttatgaaatgcatgttaaaattatgtcgataaaatatctctatgctgaaacggaagtaaaccattttgatgtatgctaatgtaagcctttataagggatattagtcatatattcaactgtagttctgattacaaaacaaaaatatgctggaaattccataaagatcaaactaattaaggtacttaattgcctctgactaattatggaaattggcaagctcagtaaggaaacaagctttttaaaagagtttatattttaggccatagctttcttggcttcattttactgggagccacttgtatcatttcagatcttacactgcaagctctgtccacagagagttataaagggaaatgactgcatatgtatccagagcttaactgggacaaggagaagctacactctcagacttacagtcagaagttgggttggcattttcctagatcacacattgtttctcattagcagtgtgacttctctcattttgttgttgttgttgttaagtcttccacaaggcatatttgtagttcatcgagaccctttaactcaaaggggcaaaatgcctcaatcaagaaactatgaatccctgtgaaatatctgacataaaacaaaagacaaatatttcaggcataaaagaaagaacatacactctggaatttaactgataacggctttttaaaacccagttgtgccagttgttaggtacatttgtaagaacttgggaagttatttaatttctcttggtctcattttctgcatttataaaatggaaataataacayctagtttgcactgtcgtcacaataatagggacaatataagttatccagctcatttatggaaatagaaagtatccataagtagtagttattatattttatattcaatgaaatataattttttcatactatggtttactactttattagagatatatgagcagctatgaagaatcaaagaatactccagggtgctctagagaaaaattataattatatcataagaatcaaagagaaataggggggaaaataatggaaatgagtcaataagcaaatgttattctatattctttaatcttcaccttaaaatatttaaggtgccaatttccatctaaaatgacaccctgaaaggtatcatcatttacaaaaattatgttgcacagaatgaattgtgtgtagtattccaaagtacatatatattgataatttgaagtcagtgacaattatattcaatttctccatattctattaaacaaggatgcaatccattttctctctcaagcattgaaaggaacttcccttgcctttttcttctctagagcttctggtctcactactacttagagatcattagaagcagttgtagcaaccagtactacaaaagcagttcttcccaccccacctcaaagttggtcaaaaaacactgtggaaaggaagtttgctataaatgtcacaagtgcaacagaaacctgacttctgttgttacctacagcagaccccagacactgccactcagaggtaatgccaccattcagaactacccatagatgtttaaaaagtgtgtgtgtgtgtgtgtgcatttgtgtgttcagaaggcataaaatctgaatttaggagtattcaatgcatagaaaccactacgtcacccaacccaccctcaaattactgcacaacagtatttgtatgaattttatgtaataagttagtaagtataaaaaagttttgaatccaataaatatcctgctaataaagatgctctccttcagtccctatcaaaagcaagaaatctctttcgagatagttactgttttgttttgttattaaagtacctttgttgctgatctgtacatgaatgtcatcactgaatggaagcagtccaagagactcatatcattcccactagaaggagaagctttgataaatctctaaagctatggcagtggtccagtccctatgccatatggcattccacctgtcccaagaagttttgttaatgtcctctaaagctccaaacaaaaatactgagacataaacaatcaaatctactctgtggttggatttttcagctctacgtggtagctgcaaaaattcctcatgctgtgtgtgttaatgagaccctccatggacaccattaatacataaaagcaatcacccgtaactcataggccttttccttcttactatgtctgaatatgttcattgcatttagaaactggaaataaaatatacccggagaaattccagatgtcaggaggcatgaggactgaaggtctgaaagtgttggcaaaataagcaaatctacaggttgtgagcatattacctcaaaggataaaaagaacctaacaattaaccacaaaaatatattatgtaaacaaaaattactgaagctgaaaactcactttaacctacaagtattcttgtagattagaacagtaacagaaaactaaaatttttgtaacctaatgaaaagaatagcaaggagattagagcaaactatctgccagatccttttgaattactgtccaaccactttgttcacttaaatctttatctcaatggatataagcattttagatgaaataacatgagaagtataaacagatatgagtaattagcttgcttagcttctggacatgtagggaaatatgctttattttaaattctatgacttggtcaccaacagaaatctgatttattttcatatcacattcccattgttttacatatcttgaaatattttttaccttcaacactacactactttgaaactatgattgtttataggcccagtgttattagatcatcttaatacatttaaatatattatgaagaaacaaatatataataacatcacaaattttaaagtattttgctaaatgagttcagtaaaactggtttcctcttaaataacatatattttattttatgcatctaaaaatgtattctgagaagagttgtatagggtatagcagattcccaccaaaggtgtccatgatgcaaagaaaggctgtaattaaccttttctaaaggaaagactgcacagacagacagacagtgacaccaatgtatatgctgcgggcatgtgattgtcacaaatacagttatagccatgggactattcatgtccttatgtctactttggccttcattgttcctcttttctgcctaatatatgcctatcattccactcaatttttttaagcatctagaaccatatctttcaattttttttttttagaaggagtttcactcttgttgcccaagctggagtgcaatggcacgatctcagctcactgcagcctccacctcctgggttcaagggttccagcgattctcctgcttcagcctcctgagtagctgggattacaggcamgtgccaccaagcctggctaatttttttgtatttttagtagaaacggggtttcaccttgttagccaggctggtctcaaactcctgacctcaggtgatccgcccacctcagcctcccagagtgttgggattacaggcatgagccaccgtgcccagcctctttccactttaatcaggcatgctgatgaggtaatcaatttcagtataaaatctaagaatgagtcttacggcctagttctttaagaacctctggaattcatgtataaaggacaggatgagacaaaggcaacaccaggaagaggccacatttacttttgaaaactgtttccctacaattttctgtaacttccccctcgtccttgctttttttaaaaaaaaaaagttttaatacctttttgtctccccagtacagtataaattagtctacttagttctgggaatagaattagtagtaggcactttttytccataaatgaatacacctttacacagaggaaaagactgcaaacgtataaataaaatcaaagtaagtattaatgttgtcraggacaactgcaaacatacagtgtgtgttgcaaagcagtgtaagagaatgggagtaaggtggtggtgttctaatagtctgtgggcagcaagaaaattaggcccttccctttctggccaagcaggtcttaacccttccatcagtgggtctcaaggaagcagagcaactgcatagacaagacataagttctgccacccaaggagagggccaccaggctctcccttttaggaccaactaaatataatgctggcactttgaaagagtacccagatattcagggcaataccacccaagcccaagttacatatctaaccttttaaaatatatagctaaaagccaattgcactcttatatttcaaacatagtattgtaacgagaattcaaaccactatattatagttagtgtctggccttactcatagtatggagcctgttggaaatgagacagaatactatgcttagcacaaagtatgttcttattaaatatttattgaaggaatgaacattgtcattagaattacatttcaagtaataataatcattatgatggcaaacactgaaaaggagcttatcaggtggcaggtattgttttaagtgctttacaaataccaactcaactaattctctagacaaagtgcacacaggttatttacagagtaaactgaagcacagagaccttgaatcacctgcccaaatcacttatgtattaattgtagatttgggaatcaaatccaggcaacctggctctggaatctgaggccttaagtacgtcaaaatactgccaagttagagtaagatttacatccatattgatgctattgcttccaaaagggaaaatggattttttkttttttaaaggagggcatggggatagagaagtccaagttgatttgggatatgtcagagaaggagaagctttagtaggaagggttgggaacttcctggcagagcccctctggagaggaaaagtagatgtcagtgcttatagcttgccagtctaccgctcctgctccctccacggcttgtgacagtctctgtcacagtgtggcttaagttctctcttgctgtttcaataacagcttaaataaaggctgtatcccacatgtttcaagtcaattcatggtgctcctgtcttagtacaggctgcgattaacaaagtgccataaattgggtggcttatgaacaacaggaatttacttctcacagttttggaaggctgagatcagaatgtcagcttggtcaagttctggtgagggctctcttccagtttgcagactgacctcttctcattgtttcttcatatggcagaaagggggcaacagactgttctggagtcccttttataagggcactaatctcatatacgagggctccatccttgtgacctagttacctcccaaaggctccacctcctaataccatcatatttggagttaagatttcaacatatgaatttggggagtagacattcagtccataagagcttattagacggctctgctcatcgtagttggatctggcagtttaaggaagtaatttgttttgtcctgggaggagttaatttcttgtacttgctagtgagtgggtagctagtacaggtaaactgttaattggcayttgcacacaatggaaggggacccagagagtggccacttgaaaaacttggtattactgacactctccaaagtagtgtcattactcatattagcttattatttagctattagtcctacagaataacatctttttcaataggaagatttcctacctaatatgatctttttaagccaagggaattattataactagctaacttcctggaagatcagaactacagatatggctaataaaaaagttcctcctgttcaagcaccattccaatagcatcagccagctccattactgcacctactagtaccgttgagaaaaatctgccctcaagtgcaaactggagtaagtggtagagaatggtctagaggcaccacagccaaacagtgccactcagaagaaataagataattcatgtatactttttattgtggctattctctaaccagggccctacagaattccattctttaaaaccagtgttttcaattaaaataacaaaatcaattagaggagacaaaagaggcagaaagatgtgtctcaaaagcagaaactttgcctttgtggtgtcagaagcctgagaggcctgtgtatcaatgataactattaaaagacatcagtgctttcatgtcacccaccttttttaatgaaaaaaaaaaaaatactacaagggcctgccagaaaagaaattagcttgacattaatgaccagaagaacagcactaatacttaataaatagggcagttattttctctacagctttttctttagtgtgtttacactctactcatagattatactctaactttcctatcacagataacctaagtcctgaaaaaaaaaataaataaatattggtccacattctcctaaactctacaaatactgaagaaactatggcattcttcagcaaagaactagggcaaagataagggtaagagaataaggaggatatttttaatacagaaaagcttcagaggattgtcattcttcatagcttttatgatcttgaactgacttagcttaaggtgctttctctacctccaacccaccccaggcatgggaaatagagggcttaggagtagaaagagaagacttactatatctttaagaggaaagattcctttcctagactaaatgcttattcagacaaactgctctcataaattagccttaacatttcaaactctgtgtgactataataaggttttgtttataagacaactctgagtgtatttggagaaagtccctgaaatacaggttgatatgataatttcagttgtattatcagtggaaattaacatggccagttgacagtatataaaaataaataatgaaacaaaaattgtctgcagatatacattttacagcatcatctcataccattttttacactaaattaaatgtctcaccaatagctaaaatcactgatcactgagctagtaggtatatgctttatcatttccttttatttctagggcagcatgacggttattatttttaactcctctaagctttctaactacttgctctatttttcattctcaaggtaaacaatgacacctaagcaaaaacaaggttttctctgattctactagtccttcaggctttagttaaaaaataaatctagcattaccaacatgctaaaygtatattacagagcttcttcctctattatcaaatatacttttagatttgtccgaagggaaaactatttttattttgcataaaatatatgtatatataaaacacaaaaaatacaaaattaagagaaatatttcactccgttatgcaccaatagaacaataggaacgtaaggtagagaaaagtggttaaaaatacttgcaagagtgaaagttggtgtctgccacacttaggtcgaaatccatttactacaatatgtcactaacaatatgtgaccttgggcaggtgacagtctctggagccttagtttcttcaagcagtctggcataaaaagccacacttttcactgacatkacatgagtatattgcttatctatataaaacaggattatcaatatgtatgtacgaaggtaggttggtaagcaggtatttgtgtataacatcatgtgatataaacaaattctacaacatcttaactaggcaatttgaatagacaaagtttgcagctggggaaggagagctggtgccacaaatttaacagtcatctaaatgacagtatatgtcaaacacccaataaaaagcctgacccatagcaaacatcaataatacttcttccttttgctttgagcgggcaaacggaataggaaagaactgaccactgcagtggcagataagaaggcatcaaagagatagtaagggtgagaagcaacaaaagcatactgcctgactcacaactatttccaaggccagcctggcttacaagtcttcattctaatgtagttatatgacctttattaatatcatttgcagtatattattttgtattttgaatgatattcttttttaaaaaaatattctttgaacattcctcccccaaaatgcaggtaagaaaacccaggcaaaagtctagattaactatttcatttagcctcacagagcaatttaaattccattaaagcatgtaaaatctgtttgttacattacagtcacattcactataacagaatacttccagaaagatagttaaaatctgtaacaaggtaaaatgctgctgctcaaataacacacacacacacacacacacacacacacacacacacacacaaaacttatatgcttttacatctaaacaaattgccttgactgggaatgacttttaatgtactcttccaggcaaattccctaaaggcaaatactgatatattccttcctcctgacatggaagtattcctcctgacaggtcagtagtagcacaaactggcttctaaggtaagaagattctagcattttttactcttaaacatgtcttgagaccagttactgtctttaggaaataaagtcaggccaaacagaagttgatctactctgagctgaacaagaaaacatttttttaaagggcacttcaagtttcacattctttctatacacatccctccaccctaccttcccatcctaatcatccattgctggttaaggataagtccatttattctacaaaagaaagctacttggttccatttctacagccaggaactatgtagtagacgcaggtgagagagcttgttgacaagcaggagcaggagtaggagggagccacatggaaatctgtggttatcaggcagaatctggcgaaaggtaatgagagcaaacagaagtcgcactggcacagagcaaccttatggttgacacctttactcatcaggtatcacttagagtttgggtgatcaactatgtacccaagtggaagagagaattttctctcagactcacccagaagccatcaaagacagaatataacaatatatttttataaccctcatcagccttgatcagattattttatgccctgaaaagattatgagattatgagagctcatattcccatatattatttaatgtcaaggccaaatatttaaaataaaaatactacaccatgatataagtataaggaactccaataaagtcatttgtttcctttgacttttaaaaatatcatgtgtcaattagtttcaaaaaattttatttttatttcctgctattctaaagccccaaatttgtatttagtctgaaaactgagcaatccaaacggccagcaatcataactccttttcttttcgcttcttccaacaaaacttagtgtgtaaaatacttaatcttaataaaattaagtgaatttgtttattttgaaagatagcaatctcaattatagttgacaacagatacaaatcagtaagacatttggaacacaccaattatgaagtgccttgtccatccagatggagccaagagaacagagctcaggagaaacccaaacaagagctctggatttgggcatcacatggcaggttaatcaaagaaaggggatgattgcccaagagagtgcaaagtacacaaagagaagatcaaatgcagaactaaaacaaatagccacaattttaagcaggataaaggcagaagacacaactaagactaaaaacaaattacagaggcaagaagagagtggtagctgatgaggtaagggaggagtttagaaaaatgatggctaatcacatagattgtacagtgatcaagcccctgaggagagtttgagttgggcaattgggaagtccttggcaacctgagacagctctggatgatcccagcagaagccagacttcagtggacagagaattactaagagatgcataaatggagatattgagtaaaagcaactgttcaaacatgggagaacagagagaaaggaaaagattgaggagagattaatgtgagggatttcctcttttgtttatttctcttttgtgaagtatgtggagatgtagcctctttgaggactaatgggaagaaattaaaatacaaaagaaagtcgatgggtgtctgtgcaagctcttgcaggaagcagggaataacagaacaagggcgtggcagaaggtatgctcttgacagtgggttaagatgcttcttcttcccactctgagaatcagtgaagtaagaatggataaatagataaacaatcttaaaggcgcaataaaaataaaattgaggtgatttttgtctgacggtgataaagtgtggtaatgatttaaaaagaaagacccagaaacaatccttaaaacagagtcaaacattgagcatccatctccaacgacttttaaagaaaatatagttcttattttcactcaggttttataactcccaagagtgattatttgggattaaggagaaaagggatgctaaatatagtcctccgaatgggaaatcctcaatatccagagatgctgaccagagagaacagaggccaatcagaaagagcctcttcatttaagtgggaaaaactaaaagatcaataggagatcttccagtacatattttaattgatatacctaattaagatattttagctgggttagctaatagtatttttagcgatataatttatattcctttaatattacttattttacctattatttacacatattttgaccaggctatgggtcaacttcccattatttaatctgtgtcctactcatcaattgaccttacatctcaagactatatcacatatgcatttgtaaaatattactgatttcttaaaatttctctgctcttttagaccagtccacttttaactcagtattccagaggccaaactacttataaagtcacagctgtctcttcgggatttggcagtgataccatggcctggtcatatggcacaaagtttctacagcacctttactcaacttctgccttggggcacagccctctgggaacacacatctgtctcctgtaggactgtgagcccctgaagagcaagaaccagatcttttcagggttctagttcttctgtagctagtaaaggaacttgtctattgtgacttttcaataaacatttgatgaactgagtattcatcctacatttagtactcttttaatagtggagtagatgtttacttaatattcaatctacctatgacagtctaccatttagtcatgtcaacactcatttatcttgcctaaggagcagcctctgagaaagattcctgagatcccagcagaatccacccctcctttgtaccattacacctgtttataacatttgtaattttgtaccataattatttgcttcaatgcttcctctccttcaataactatgagcttcaacagtgttaagaacctcatcttatttatcacaaaagccactacctgccacaatccccagtccacaacaagtactcaatagatgttgtgaatgaatagtacatatgtcttcacagtcaaatatatatggagctgataaaaacaataatcaatatttgtttctaaataaaagattaacacctaaaacagtattgctttataaaatttcctttataaattattttcaccaagtctgtgaggtaggcattatatctaaccttatattagaaatcacaaaattacttaccaagaccatatctacttagctctacccagtatcaacttctataatcatatctaacatgtagacactaaatttccagtttttttgcaatgtatatacttatgcaaaaatattacaaaacaattttacttatcgttttcatagatgattttccataagcagaaatgtgtttcagtgaattgtttttaaaaaccaaactattgaaaaataacaattaaaactgtcaccatttagtatatttatttaatatgttaggtcttaatgaaataacatgcactacataaaacttacattgtaaagtatatgaaagaggcaggaagtaatagatttttggcttccatttatatttacataaaattacaaagattttaagtttattggattattaacataatttcaatttaaactaatttaaatttaaagtagtaaggacagtagaaacctaaatcccattaatatttttggaagattagatgagaggctagaaacaaatttttttcaaaacttatctattctgtttcaactgataccaatttctatgatctcaatacaaactggacggacattatcagctgcttctaaagactaagttgaaaatataaacttgcaaggaataaaaaagagatagactggaagaatataggaggtaacactactagaagtcaaagtaaagtgcaaaatttcaatcatgtctctttatcaattgccacattatctttttattgtgtagaaactttattataaaggattttttatttttaaaagcaaatatgtacatatattttcattgaaagtctaattacggactgagtctgtcttcaggatgctttatatatgtgagctcatttatttccattgactaccctatgagttcctttttatgagtgtcgacgattctaaaatccatgtgttttccagagcatgataaatttaacttttagaaattatcagaaaaatatgaaatttattaaaaccaacacaaaaatttatctgaaatctctttaaacctggaaatattccagagaaactttttgcattggttttaatgaatttcatatttttcatgaatatgaatagaatgctagactgtgtaatcaaatttaatttttattgtttattttattttatttcatttcatttcatttcatttcatttcatttttgctctatcatttcatttcattttattttatttttgctctatcaccaaggcgggacttcaccaacacaatcacggctcactgcaccctcgaactcctgggctcaagtgattctcccaccttagcctccaagcagctagtaccacaggtggggtatgccaccacatccaccgttttgttttgttttgtttttgatagagacagtatctctctgtgttgcccagactggtcttgaactacttggatcatrcaatcctcccacattagcctcccaaagtgctggsattataggcataaggggccacacccataaatttaatttttaaactaagattatttgggaccttaggaaaaatcatgaaaaataatctcttggartaatgtgaaagattatattgttccctaaaaggaacaaaatgctttacggtgctagccttttataccatgctggccatgccagctaaagttcagatcgggtcatcatttccagaatcaaacgataaaaatcaaactagaaaaaaaaattattcaatgaagtgacccattcatcactaggagtgttaaactagaacaatgtggtattttctctaaagcatcttacaatcattgtaaattaggagattatgaagtctcattcaaaaagattatggaggacactaagagtctcctatacactattttctaaataaaagggactttttaaaaaactatttagttaataaaagcaatacatgctcattgtgagtgtgggagaaacaggaagaaacaaaataaagcactttcacgaaataggaaatgaaaatatgagaatttaaatgatttaaatttaaataatcatttttcctagcttctttccccataaataatcattgttaatggttccttcaaaatttttcactgcacgtttgttgtttatatatccatatagctttaaagatctttacgtaaacgctctcatactatttgcagttttacatttttgtaacgtaaaaatatatcttaggcacgactctttaacagggcatacaaaattgactcactggttctcagagctgtgcagtatttcgctgaataggtatatcaatttattttgcccttactgaggctgacttgagctacttccagtttttcgtttatgaagtttccctaaacttccacgaactctcttgaatcctcttatattcacaaagccatcatgaattaatgctatgttattttacaaaatcggaggcccagaaaatactgaaaaggttgaggaagtaccaactcttacaacgatcacataagccaacaaattcctttaaaaatgaacaaagtattggctgggctcggtggctcacgcctgtaatcccagcactttggaaggccaaggtgggcggatcacgaggtcaggagatggataccatcctggctaacacaggtgaaaccccgtctctactaaaaatacaaaaaattagccgggcgtggtggcgggcgcctgtagtcccagctactcgggaggctgaggcaggagaacggcgtgaacccaggaggcggagcttgcagtgagctgagatcacgccacggtgctccagcctgggcaacagagcgagactccatctcaaaacaaacagaagagaacaaaacaaaaatgaaccaagtatttatagtaaaataattctcaaggtaatatagctaattatttgatgaagatatctccatacgtctttaaaaaggcaatcaaagataaaataatcatagaattgggcttcaacaaaccaaagtaccatctgtcatcagttaaggaagtatcagctggaaggatgggaaaaacaactatattttaaaactcagcagaactactatacaatgcgatagctttcagtgtgttcactcaatactattacattctatcaaatgacaaatccatctaattctaaagactaaaattgcagtttaaaatgtttaaaataattttgctcctttgaaaattactcttgatgctaggcaattactttcaaattaaaagttccttcagactttagaattgtcacacattagtagggatttaaagcaaagatataccttacagtaagcaacaataacaaagaaggaggaaaaaacattgactaaatataatttagaaatcagtagacagataatattgcacagaagaatgaagagtacatagataatctaaatctagggacatctgggttttaattacactttttcaccaaggattccaaagatggcattttgaagccatgtattcttttcctgtcctccaggacacaagaatgcaattactaatgggaaaataaagacagactttcttttactcattttgaaaaaagaaaaaaatgctctctctagtctgcataaactggctgaagttttgatctgatgtgacaattcctctaaatatggctccagatctgcccttagaatcatataatactgtgagtaacaacacaggtcagaacggctctcggtcatattcctggctcaactactcaatagcagagtgactttaagcaagttctgagtcttattttcctaacccgtacaagcagttattattaccctatgggctgctgtgtggatcaacttacataatgaactcaaagttcctacaacatgggtgtaccaggtcactctggttaaccacagctccttgtgaagcagtgattcatactttccagcatgtatcacatgctgcaatcaaactggaatccataactattccctaaacacgccctgataatttctgctttgattcatgctacttctacaaatgatgcctttttccaccataactgcctaccaaaatcttatccttctttcaatacttttgcaaatgctacttcctttatgaagcatttttcccaattctcctctgttattaggactcgttcattctggaactctgttcttccatcatacttatatctggccttagagttataatgcccttgtcatatctttctctttctttagattctaagttcccaaaaataatgtaaacttcttcaatatttaccaaaaactaccaattgaattgaatgtttgagtggagaatatatgcattttcagagatatatacaaacaggtagagatctggaaaactgtttcagctcccaatgtcctccctcaatatggactaaattccactgaacttgatagctatgtcagtcactacattttcgaactgcatttcctagtggggctgttataatttgtgtccatttttttttcattaatttacatgtatttgtgaagtaggtttcaagaaagggattgaaataaacacatttttattctgccaccattttacaaaaaaacctgcctcatttccgaataaataaatacagcctacatataatgtatattaactcaaatatttcaattctctcatttaagtatgcgagtatttctatttaaagttctttgattctaaaactaagagtaactggacaacctgtcagttccctgtaatttccttttgcaccttcacacactgtcagcaatacaaccacagttaattaaaatatgtacgtggaacatgtaaaatagcatcaaatatgaaatatgtaaaagttgaaaacactaaaagaagccaaaactaaaaatgattctccttaacacattaaaaacagtactatgtctgaatagaaaaagaaaagccaatggtaatcactaaagttattctcctgtaacaatgttaacctatataatttgatttgagtaagaagtttacagaatgttagtctgatataacaaaccaattagaagaagcataagctttatctttcactatcattctgttttttggtgaaggagctttgagcagtaaataatttactatcaaaagcagcaaactctgctaaagttaaaattacaatcttatgagtgcatgtgcattagggatcatgttaaaaccatcaacctcatttcagtagatgtcttatctcacataaagtatgctgctagacataaagcatcagtggtttacctctaaatgatccagtccctccaggaaactgggtgtagttttaataaaattgaactcataagtttttattacatttataatgaatgcttttcagttttataggctctttgaaggagcaatttagtttctctattaaaacatgactttatatccttcacaactctcaggtttcaattttatgttgctaccactctcaatataaatgaagatattgaagttttaataaaggtatagagttatttttattgtacatatgaaatgtgagtttacaaaattacagggaaaagtacagcatattaaaatttctttctattcttacttttctrtatcctttctgccacacaaaactaaccaaaggtgatataacatatttaggtattaataaagcaggattcatgatattgtcttttcttagaataaagcataatctaatctttcaaaaatgtcttattagcacagtcgaaagtgtaatactgtttaatttaacttgttggatctttaatcaatctctttattacatctagtggaactatataaaattttcaaacatattggctttatttacaccatcaaagtttgcccaacagtagggattattacaaatgaacaacagaacattttgtttgtattttgtttgtctactttcccaactaaagaacctggtatatactgggttctattttggaagcttacatttaaaaattgaggaaggtattatttctgcccgtgaagaactcactatctgctggaaaaaaaagaaacagacacatataccattataatacactgttatatggctgtaataaataatagacataataaatatctatatccataatagataatttagagcaataatgggaccactgaggaaaagcaatcaactctgccctggcagagaaacagttcatggagatttcacctagaacttgaggaataaaaggaattccacaaacagataaaagacaaaaaggcattacaaacaataggaagaacccattaacataactgccaatagtatttagtactcctgcaagaactaatattgtcattgttgcttattttattcaataacaatttgaacaaaattatagtactatagtgaaaaaccaaagagcttttccttgtggaaaattcttttggaaaattcttttagattaagtcttctataaagacaaaatcagatcctactcatacaatcctgattcccatcttggcttgtttggatgtttagaaacaattcttatctgttctaagaaacacatatgaaaaagcttgtatcaaacacatatgcttggagggtctgaagacatcttttaaacacaaacaattcattaaatggaaatgcaaagcatgcctacatcctactactatataatgaaaatcgatgtgttatcaccaaccaacatttaacgtatcaaatccaaaaaaaaaaaaaactgcgtcaatttcaggaatgtaatctttatacagttttttgagaattataatataactgctatggtctgaatgttggtgtccacccaaaattcctatgttgaaacctaatccccactgcaatagtattaaraggtggagcctctgggcacagtggctcacacctgtagtcccaacactttgggaggctgaggggggcagactgcttgagcctaggagttcaagatcagcctgggcaatctggtgaaaactcatctctaaaaaaaatacaaaaaatttgctaggcatggtggcatgtacctatagtcccagctactcagtaagtgaggtgggaagatcgcttgagcctgggagacaggggttgcagtgagctgagattgcgccactgcactccagccttggcaacagagcaagaccctgtctcaaaaaaaaaaaaaggaaaaaaaaagagagatgaggtttctaagagctgattaggttgtgagggctccgccctcatgaatgagattagtgcccttataaaagaggctaaagagcttgtttgccccttccatcatgtgggaacacagcaagaaaacactggctatgtggaataagcccaaaccagaaactgaatatactggcatcttgatcttggacttcccagtctccagaactgtgagaaataaagttctgttgtttttaagctacccagtgcttgttaaagcagcccaaatagatattaaccaagccacatgcaaaactagacattaatttcaaagcccatcttttgaaaagtagcttctccatttgactaaacaggttcctagtgttgtaataaataacatcatttgacccatcattcaaagcgtaattgtcacttgagagacaattaaaagttaaatgaagaatttctgtttcctttgatatcaggttataaatttccatgacacccactcttggcagaaaaagtcagtgtaattaaaatccattaatggaacttaaatttgtctggaaaaggaagctgttaactggagtgctggcccctaagtccaccatgctaacaattctctgataacaagtttcaagaatcaaaaataactgtactcacgcactcatagcttcctgtcatgtagaattcattgttatggaagtgtcttctttctcccatggaggcctatcatttaaactgatctactccaaataaacccaacggggcaaagatgagtgtcctcacagttagtttcactcgtgaacccagccagcaattcaagtgcctccactttgttctaggttgctgcactctaatgatcgacagtacagaggatatgtagaattgactcttcacagagactggctaaaacagtgctaaaatataacatcaaaggaaaatattatccaagcaaaaaaggagtttggggaaatgaactacttctctttagaaatgagataaagaaataataagcaactttacactatgaactctatctagttgacccaataatgattgattagtagagtagaaacagagatgagtgtgaaggggatgttaggaatttgtagagacctagcctcttgaaatccattttggaaaatgatggacagaaacaatcaagcaaataaagaaatccataggtgaccaccatattgagagaccaagtttaatatagatggcttgagtattgatctcttgccctaaactataaacattaatggttatggggaagtaatctaccctctgtaaataggccattggccatccaaaaatgagaagtgactattacaacctcccaaactagtactatctattcagacacagatgcaagtaaaaagaagaagggtgatattcaaagggatgatagttcatttgagatgaattaattcttgaaacaaatgctaacataaaaagaagtcagtcaccttaataggcaagacggttttttttcttttaccatattcattcaataaacatttattgagggcatcctatataccaggtgctgatcttggcactgggatacagcaaaaaacaaaacagataccagtccctgttctcatggagtttttattctaatgaaggaaacaaacagaaaaaaaaatcaagaaaaatatatagtatgtcagatggcaacaagcgttttgaagaaaatgaaggcaagatagatacagattattggggaaggtgttactttaaataaggcagtcagaaaatataaggcataggtttttaaaacaataaaaaagaaataatgtttgggaaagagtagcctagggtaatattacattattatactggttctttttttttttttttttcaattaaaactgaaggaccaaagaaacccaaggaattagattcatgatgctacttgttctgcttctatcaccatcaaacattaggtaaaataatwmttctttgccttcaccttgtccattttctggaggaagggacataggtttgatacaacraatcaaaaaaacaaaaaagatcctcggggtatttatgcagtataataaagagcaaagcaatgtaattccaaaaagatagctctcaaatatttgaaaaaaaatcactaaatcctaaaacttctcttggaaacaatttccatgtctcaagaccattacattggttacccttgtaagaattttcttaggaatagtttaaaatggttactttgataatacaaaagatctcacactatagaactgctgaatggactcacaaatcacttatacttttaaagtctaaccatcccaatgtacactcagaaaggaaataaatctgacattcaaaaaatattcttttaccttttatagtatctacattttaaaatattattctaaaataatatcattcctctagtggatgtgaaattatcttgttctgtccaacaatgtttcaacgactgagacaaatcctgctgtgattagttttgaaaatactttcacaagcccacatcgctcactgatgcaaatgtctcatgagaggcatctacctttaaaatgcaatttgggatctgcttctgttaaaagtaaattacaatatgaactacaagggcataaaacaacaacaaaaaaatctcattttagtttataataaaacctagagcatatcatcacctctgcaagacaacatatatgaaaaaatatctgattaaaatttaatatgctgtacagttttccaagcatactaagtattaaataatgccagttgatctatattatgtgtattagcacataagcataaagtagctatatatgatattataatgatctaccagctctcttttcccataaaaattctgtactatactttgtgattttgaataaaaataaatttttaaaaaaataaaacttcttggctaccacctatatacttgaggtactttcacatttaaataacatgttgagtactttcatataagaaatgatttaatctttacaagagcttatgttttgctatcccccatttaaagataaagaagctaagccttagagaagttaactgacctactgaagatcacagagtaagtgtctacaattcaaactgcttttattgatgtagtcattacttaaacattgttgggagtatattgggatgtaaagtgtgacaatatagtaatcagaatgaattctttttcatcaatatatcaaacttcatacactatcttagtccattcctcctgctataacaaaatatcagactgggtaatttataaggaacagaaatttacttcttacagttctggaggctgagaagtccaagaccaaggtgccagcattcagtgtctggtgagggccttcttgctgtatcctcacattgcaggaggggcaaaaagtacacaagggacaacactgtgtcttcacatggcagaggtggaaagccaaaaacaaaacaaaacaggcctaagaccctcctttccacctcttttataaggtcactaatsccattcatgagagctctagccttatgacttaatcacttcctaaaggctccacctcttaatactatcacattggtgattaagtttcaacatatgaattctgggggacatattcagcccatcacatacatcaataagtgaagcccttcacagtgtttttacttggtttgttgtgtatttctttcaaggaaattatcactgctacagttgtccaaagaacttctctatggagattgtcacagagccaatttcctaactcctcaggaaaatcagttccattgaacgtcacaggaccttatacagattaaaggtctcttgctaaccaaatatatatttttctccctccttccaactttacctctttgaatttttgaattcaagaattaaatttgtaaactatccatatcagtaaaaaaaaacattaaataaaaattaataataacaaaaaatataggagatttacacacttaaaaaaaagattaaattatgaactataggccatgccatcttgctcccattctgctctctcccagttgctgctctagagctgagtctaatcctatactgagttccacagaggagcccatgggaacaagctgaggctgttgatgaggggggccttatttgattcatatcaggagtcagactagctggggcgagttcatttgtgacctgcttgcattaagtgccaatacataataacatagaagaaactggctggaagcctttatgcatcatctacaagtacaatcactttaagtagaggaccgcctgcacagctccaaacccaagtgcacacaattaaaacgtgctacaaaacacagtgttaaatctctaaagacatcccaatgataccaaatctgtttttctaatggcacacaagactgctttaaaacacctcaaaccctatcttattcttacacagctgtgattttaaagaatctataacctccttcagatctcactattagtaaagaccagaggtttttcattacgtctcccttagaacactagatagtgcttgctttaacttaagcttatttcctctccatccacccagaggaaacaaacaaaaacatgtttcttttaatatccctttataccagtaagtcccctttagctttccagcactaagatacattaagtccagaattgctaagcaattttcaagcctttcaattagttcccccaaatcagcatctcgaactacatttcaagtctacatttatatgcattttggtgtatagcgaccgagtaagtgactgtgctcttcagatttttttttaattcttagtttttgtgggtacatagtagctgtacacatttatggggtacatgagatattttgataaagacatacaatatacaatgtatcaaaataataacataaggataaatggaattacctcaagcatttatcatttatgttataaacaatccaattatactctttcagttattttaaatgtacagttgaattattattaactacagtcactctattgtgctatcaacaagtagatcttattcatkctttcttaagatttttaaagtgagaatatatacttagaagcttattttcatctcccaagcaagagaacaataaaaccaaacagaacaaaactaataacaaacaataagcctcatcaggggagatgattttccttaggtgttactcttaggctccagatgagcacacccagcatacatttcaaataagtggataaaaaaaagaccagaaattgccatttatcacgcttcaactctttctgaataaaaaataagttttacaaaaaacatttttaagatttttaaggaaatttattcaatgatttaaccttggaagtgtctctccttttggaatatattgtacaatagaaaattttccagagtctccattttaaaatcagcattaagatactgccctggttagaaatgtacttaaagcatcattatcaatagaatataccttggaaaggatacagagtgatagccaagcacttgacttttggaaataggctgtcttggttaagtagctcagccactaataatctttgtgcctcagtttcctcatagaaactaacctatttcatggggtcatgagaagatttgagattatagccataaagcacttactgcaattcctagaataatgtaagagctcaattaatgttagtcattattatgctgacttctaagaaactgcttactctttcattcccagacttcaaatacatctttaaaaatgtaaaaaccaccaattaattcctagcaaagatagaggcttgctttctttctttctttttcgttttatttttgggttttttttttttttttttttttgagacagaatcttgctctgtcatcaggctggagtgcagtggcacaatccctcactgcaacctcagccttccgggttcaagcgattctactgcctcagcctcctgagtagctgggactacaggtgcgcgccgccatgtccagctaattttcatatttttagtagagacaaggtttcaccatgttggccaggatagtctcaatctcctgatctcgtgatctgccctcctcagcctcccaaagtgctgggattacaggcatgagccaccacacccagctcaaagatagaggttttctattctaaaatattaattttactctaccagcctttttgtttgtctacaaaattagcttttctttctttgttacaagagctaccaatagttaatccatcctcgctgtaccctatcattatattgcccatcatttcacacatttgtcttcctcctactgctctcagttcaaaagaccccctaccaaacaaactattattagcttccaggattccacttttactgttttttcagtcttcagtcaggacctaatggactcaaacagagtctactataccgtttatatattgcttgtattactcaggtttggttttaaaggctcatagcaaaatgttcattttgaccatatccaatatgttgctattttaacaacattctctcaggtgcataatcattcaaaaaagaacaacaaagtgaaaatttcawtgatacaattattttatttactatttgtaataggccaagaaaagggaacggtgaaagcaagaagatttttacccataacatacagagcttactgttgattagaattccaaaatcaaagcaagcccttaattaatagaccctttaaattattttattttgtggctgaattaccacactgatacttactcatttaattatkccctggcccagagaactgacatttttactggcaggttatgaaatgtttgttaaagctatgaagtctaattataaaagccttctttcagaggttcacaaaggatggagaagaactagaaaattatctccctggtaccaaaggaagagttataaaacaaatgaaaacaaatagagtgaaatcacatgaatgatacatgtgtaggtagtttagagtacacacggatgggaggctgggcatagaatacacagcagaaaatgcaaggattggtctggtgcaatcctttgggtctttatagaaaatgctatgatttacttttttttcttcaatggggttggctgtgactgaagtttcatgattgctaatatgttatcattactcaaataattagacttgggagcaatagatttttaaaattagctatctcaaagaaagtgtcattataatcatctaattatcctttgaggtaacttatgtacacatgctgtaaacgttcaatatcttactcccatgggtgctgcctccatgtttatagtttaaaactgatagcattataagaatctgtgatgacaacttagagagcacaatttgtttatttcttcagaaatctgaaagtaatgttcagaaagtaagaactcacagccgagcacggtggctcacgcctgtaatcccagcactttgggaggctgaggcgggtggatcacgatcacgaggtcagcagatcaagatcattctggctaacacagtgaaactccctctctaataaaaatataaaaaattagccacgcatggtggcacgcacctgtagtttcagctacttgcgaggctgaggcaggagaatcgcttgaacccaggagacggaggttgcagtgagctgagatcatgccactgcactccagcctcggcgacagagcgagactccttctcaaaaaaaaaaaaaaaaaaaagtaaaaactcactaattacggattaaactcaaaaattaatatgtagtttcagctaaggtggtaaaactcatatttacatttaatttattcacatatcaatacagtatttctctagcctaaatgccaccaaacatttagctatattcaatcaacaagattgcttagccagataaataattaccacctttatcagaataagatgccctcctataataatcagcctgtaggagcaaatgactttttcaaaaacataattgtgttaaataagtctctaaagagactgatcactctagcaacaacacagaacagtatttgaactataaaataactcttctttgttactctttattacatatacaagtatatcatcaagaaactgcccagaaagaggtgggcaggacacttacaggtgggcctgaaggttcgggtcagtaaaagaaaaatgactcagatattcttgatctctaggcctcatcttgcccacttctaggcctacctatgctatatgcctattagccctgttccagttcatgggagggaagtacagtactcttcctgtcccctcagagtccaagcaaggtgttctttgccgagagtgaataatcaatctcttctccgtgtcctctccttttagctgagcctttgcttcagagtagctccttgtatctccttttggttgagtaactcctttccaaatagctccatttggtaggagactttgttttttgctttcttgactctctgcttcaccttaattaaaattaccccagcctcagcaattccctaggaagagacccctgataggaagattagtagagaattaattgattagttggcatatttgtcttaataattagaaagttcatcttttttaaagaagatcacacatccaacataattatgtggctatctttattcatcagcttaaagttttcaagctgggtttatttcacgtgtaaacttacarttgcaaaaactaacaaaattcctcaaaactactcttgctatttctaggtagaagtcttttcaactaggcagataggtgcctcattattcttagaaaactctaaggactacctgcacttattttataacccaattaatgtatcttctcactaccattggaaagaaatatttctcttttcttatgcttgatatatttttaagtatgatacattttgaagtgtgtttccttttctagttttactacctggttaatagaaaaaaaaatactacatctgcctacacttatattcttaatcataagactgccctgaagggaaggtattcaaaaaaaacaaaaactgctcttaataccatgatattagtatattgaaataagaaccatgattaagaaatattaatatacaaagagtaatctttttctgagagtgagaactggaacaaaatgagaacaaaattactcaaaatgagaaataatacttgaacttgaaattcttgtgttgtgtcccccagcagtgtagataaggataaggcctttggctttacctggacctaccctggataaaaggggaaagagaaataaaataagaaatttaatttaagcaaaaatgttcttcttcttcctaaaaaataatatattcagtcagttgctctatctaccaagtcatttaataaatatgtattgagtcagtatataaaactttgtgaaatcccataaagtacaagaagaaatacaagaaaactataaatacttcaaggaaatactacagagagtactacaagagttcagaagaaggaaaccacatatgattagcctgcatagatgtgaatgcctttcagataggccccaaaacataaattggattttcaccaaaggagttaacgtggagggcatcctgaatagctgggaggaaatgactctatgcggaactacaaaagcaaagtgtggaaagaagaaagcaatggcttattcagagaaagagagacgaaaatgaagaaaaaaaaggaaagacataagaaagacactttgagtttaaagcatgccgcaattcaatgggaggagtaggaaataggctggaatccgaattgaaccaggtcaaaacattgttgaatatcaracccaatctatttaatctgtaagaaacaaggaccctgagaaagattctgaccaagggtatgtgatcggaaacttgacagataaatgtagtatacttgtaaagccatactgtgaaaaacttggggattatttgaacacaaattatcacctggaaaaagacagaaaacaaggcagaagactgtgcaaagaggttggaatattcaaaacttcagattagaagacggaaatcctggccgggagcagtggctcacgcctgtaatcccaacactttgggaggccgaggcaggcagatcgagaccatcctggctaacacggtgaaaccccgtctctactaaaaaaataccaaaaaaattagccgggcatcgtggcaggcgcctgtagtcccagctactccggaggctgaggcaggagaatggcatgaacccaggaggcggagcttgcagtgagccaaaatcgggccactgcactccagcctgggagacagagcaagactccgtctcaaaaacaaaaaaaagaagattgaaatcctgtttaatgttgctcttctctttctatactataaacgaaactaaggtaatcattaaatcatcctaagcatttgtattgccattttgacagtcttcatcttgatctattaaaccagatctctctgtctctctctctgtctctatctctatctctctctctctctctttctcaactttctgggggaattataaggaagagtcagggaaccctaatctggaagatttattttataaaataatagttcatagattttcctttaaagagcaaacaactttttccttcaaagagcaaacaataattacggccggatgcagtgcctcacgcctgtaatccaagcagtttggaaagcagaggcaggtggattgctagagtccaggagttcatgaccagcctaggcaatgtggcaaaagcctgtctctacaaaaaacacacaaaaaatagccaggtgtggtggtgcacacctgtggtcccagatgttcaggaggatgaagtgacagaatcacttaggccagggaggcggaggctgcagtgagctgagatcacaccactgcactccagcctaggcaacagagtgggaccctgtccactaccacccaaaaaaaagggggggtggcaaacaataattattgccaccatcataaaaatataaatgttttcatatacataatggatgaataaaatgatgttaaaaactcaatttaaaaaataattgttacacacagtggggtctggttgaaaaagaagagcaattctaaaggtaaaggataataacatgttagatttgtggattccatggggcttctgctatttatgtctgcccactgcatttcccatctcctgctctgtccttgtgtggactaccggtctcattccatgtgctctggtagagttctcaatcctcatgacggcagcccatctagagcagaggctgccatgacaccagcttcagtggaggatgtgtttccaggactgcgctctccacagagctggcaggagctggaagcagccagaagccccgcccttccaggcacagctgcagccacccaagtggcggctccaaacccaggcatttctrcactcttggaggccaggaaaggccccctgtctctgcaggctcagaggtgcctgctgtcactgcctcgcctctccttgctccctgcacttgctccgatcttggagtggagttgaggcctagcccgggtgctgtcacaatcaggctgagtgtgcacacaataagggcagcactgacataccagcaccctgctgcctcagccccctccaggctttgggtgccaatgagcatgggagggaggctgagtggggcctgaaggcagcttggtgctggcctgcaggcaccccacagcacaaacagcctgggtgccatgaactgtggcaggaggcagacgcgctcctgagtggaagggggtgggtccctagcaaggccccaccttcaagctggggagggcctgaagccctccaggggccaggctgctggtcgtgcaaaccagaatgggaacttgtggtaccttccagccctgcctatggccacccttggacaaactggtgcacacttcctcccctctgaggcccacaagaaccccagactcacccagactcaagaaatcgatggaaccactagctgtagggaggagttacccattccaggctctcctctctgctgagagctaaagagatgacagtatgaccagttgtggagaggagctacccacaccagagtctcctatctaatgagcgctgaacatttgaaggaatgacctgcctgcggagagctatccaacgtgggtctcctcggagctgttctgttgctcaataaagttcctctttgccttgttcatgtgacagtcctacaaatgtaccccctgtatctaagataaaagstgatttaaaaaaataagacccaagtcacatgaatagtgaagagctataagtattcatacatttctaatgtaaaatatatgatggttaactttggtaaacttgagggtagaaatatatttttaatacacaataaatcaattaaataggcaggtaatgattttatcttgaaaaaaattataaaacttcatcatctgttcccttttactatccagtcccttccaagggtatcttctcttgcttatttagaaaatctgtgtgaaacactcaaaacaaatttcatgkttatatcttactaaaattagagaaataaaatcaatcactttgagtccttctatgctttaattaaatgtatcctcttagcaaatttgtttttaatccagtgaatgaatgacaaagtaatttttcttycttttttttttttttttttttttttttgagacagggtctctcactctgtcacccaggctggagtgcagtggcatgatctctgctcactacaacctccgcctcctgggttcaagtgattctcctgcctcggcctccctagtagctggaattacaggcacctgccaccaaatctgtttttkttttttttttttttttttaatgtagtagagacagggtttcaacacgttggccaggctggtctcaaacttctgacctcaggtgatccacctgcctcagcctcccaaagtgcagggattacaggtgtgagccaccatgcctggccaattttttttcaaatttatgttaaatctcacctaaataaaatatatgatattaagaatgttcagcatcttgttcaacatttaaacaaactctagtacatactgtgtagattatccagagctccataaccatgtaaaaaaaaaaaagagagagagatagagattaaagtagaacattcaaaatacagccacaggccagatctggctcaaagacttgttttgtttgacacataccagcgcagcaaaattgttttctgatgaaatgcttacatgtataaatgaaaaacttcacagaaaaactccaaacttaagtctcctccttagaaagaaaaacaaaaatcaaaaaccagttcttgcaaaactatgccctcattcccacatatcaccgcaatctacatactttaaactgtgaattcagataccagtttgccatagtacccatcactccttatatttaccattggttaaaagtgtcaatggttgcaaccacacagagacattatatatgtacaagaaaaaaacaaaaacaaaaatagaagtactctttcctaagcactgtaagtactttccagatcatctacatgagccattctattcattggtgagcctcccatgcatacttatgatcatacccttctgcctgaagaagtgtcttactcagaatcaaaaagttgctaagtaacagtattacactcgaatctgaatctgacccaaaatccaatgtttttccagcttctgcacagttaatacagctagcaaataagtaacaattatttttcccaaacaagaatcatgaagatattctagcctatttgaatatagctacttttatattacaagatcaaatttactacacataacaggcaaaacatggaaggcacccatttagtctamtttcaaaaaagatatacattctctccttcctgaattttgtcttatttctttcaataataaaagaaaggttagatacaaaaagtatcagatcacccacaaataggcacttaaaaaagaaaagtatgtcaatcattgggtaagctttagaaggaaactgtggcaaaacattaattttctcctctttcagaaacttctttgctcaaattctactttcattctttctaatataaacctgaggctggctcttacacaaaactgttgaagtcattcttttgttccttcttcatttctcatctgtaaatgtgctcatcaacttgtcaaccaggctgttagaatttgtatttaatcttcacattccctctcagctaaaattttctcccattctttaatcatttcctatcttgattactataatttctcttttattgtcctcttgaaattcatacttgttaagtcatgtatggccagaatatatactaaaataacatttccttccaactgtctttctcttcacaaatacatcttcattctctcttggaaaattccaatttgcctttggatcattccagatacctcaccgtaattatcttctctgtcactagagtatggagtcacatacatcaccaattttgtcatctcactttcctttgaggaggtcccaagtagatattcattgagatagtctcttctcaagagcactgttttaaaatgttccctgtcaagctggatagcaagaaacagatgaaggattaactatatcagtattttatttctttcctagaaaaagagggaatagttcaagatacattccacatcttaaacttgctttgaattttagttttggaatatatttttatcacaaattgtcaatttatgactgcataaatttatggcgtacaaagtgatgttatgatttatgaatacaatgtagaataataaagtcaagcttgttaacacatccatcacctcaaatatttccattgttttgtggagagaacatctgaaatttattctcttagcaattttaaaatgtacagtactctattattaattatattcaccacactgtgcaatagaactaaaaagaaataccatattcctcctgtctacctgaattttgtacccttaaagtggaattttcaaataaatggtttctcagattctaacatttttggcaaaagatgagacatccaattatatcatatgaggcactaacaaatgcaaatagactacccatataatcaaaagaataacatttaaggcaataagcccttcaacttcagaaggcttggctttatgactatattcagtcaatcacataaccattttgaagtcttgcagtggataaaataacacctttgaagggtgggggaaaagaaaaagagacattttatcaaatgcatgcaagtgattttgcccatataaatacttgaaataaaaccctaaatggcacattttaattttccctttggaattttctggaaaaaaaattgccagtgtaaattcttatcaaagacattcctcatcttctgatctctctctctctccctccgtctctctctctctctctctctctcwcwctcacacacacacacacacacacacacacacacacaatatgcagtggagttaaaatgttcctggttaggaatatttttctctgttctgcaatctgtagtaattctttatcttaaagctagctctccttttggtgttagaatggtggccaggagcctagcagaatagaaggagaatcaattcaagaaactctcccagtgagaataaaggaagacctgtccagggaggcaccagcactactcctaatatcagtccgcttaagtgggtacctgacccttttcacatgaaacaagaagtggtaagaaagatggtgttcaccttagactaataaagcccactcatggagcttggattagggtcagcttctcctgaagcatttagcctacagcagagcagagtagctacatgaagaaactaggatatactgtaagcaaaggaataaagggatatcaatgctgagtacagctaataacgtccgttgagtcagaaagagaattgtgacagaattatccaatctcctttactttatcttttataaacaataacaaaactagtatattttatattctgattagaagcaaattacaatagtttcaggtaatcctttacctcaaaattatgatactaaacaataatcaatatgaatgaaattctaatacaaggaagaaaaactgcctgacatgaaataactatcaatcatcttccctatatattctagaaatcttatttttaatataaaaattaagtttagtatttttggcaagattagatctctactatgaattgaaagtcttcggtatctctctggaggtgggtgttagaatcaacaggagcagtattttcatgttcttcacttttcttttcaaaataatgagctacggaaaatgctattgcctttttgtgctttcataagaagtaaaaatcaaaggattctatgatggacagaaaatttgaatcctaaggaaaataataaaatcttctctctttattcactctttccctatatatgaattgtttagcttagcatttatggtcttagtaaacaaatagcaaaatataaacaagtgtcccaagtatctgctctgttctraagttttcttatgcaagacatcaccagacctggtaaaccaaggttttacaagtcttaccaatttctgtgcacttccttttaaacttttcaattcttataaatgtcatatttcttatgaaaattaatgtcttcctcctgaaagagctgcaaataaagaatgcatgtacctatgctattatgttgtatcgcctacatttaataaaacacaagtggaaactttcaccatattttcaaaagttttatcagttttttttttcccattacaatgttaaagagaaatgcaccaataaaccccaggcaacgtaaataaaacgttccccatatgatcttaaaagaaatcacagaaatatccaaggctatacactcagctagatctaaaatattttcgttaacctaaagacagttgtgaaagtctcgagatgggagaactccaattaacctagttcattaccaataaggctttaattcagtcaggtactaaaatagttgttttttctgattaattatttcaggctgaccagttataggccagggctacgtacatcaatgtcactcacttggttagaaatgacatcagtggaaattactttccccatgaacagttctgatatctgagcccctgactacagccagttattacaaaagtataataaatcttgaaaatcaagggcctgcctcttctaatacaaaataataaatacttttcttaaaatcccagagttctgcttaaaatatgaaataacaaatacatccacaacttagaatatctatacaagatcaaaattcatctatgttgagccactaaaacttgtgaaggagtgaaaacagggcatgaaatagaggtattaagctagaaagaaaaagactacgtggctaacaaaatcaactattgatgtatgttatactatttgggtttagctgtttagctgttaaccatcacaagttatttttacatggaaatttctaacttactctactttgaaatgccaaattactaaaaaattttaaaagcctctttttgaaatctagaataatgacccaaatacagtaaagtcataactttttttctttgtttgaggcactatttctaaaagtgtaatcctaagaccacctgtgatgatcaatatgctgatgttcagactgttcccaagacctaataaaccagaatctctggaaataaggcctaggaccctaaattttaaacaaataatgcaggtattaatatttctgcattggtttgagctattgtatttgccagtggataaattttaagtaaacagggctagctaaacataaaaattagctctaatgatatcataaaattaattcacatattattcaaattaagtgagtctctatttttgcttacatattttattatgatttcttaggatgcattatcttatgaaataatgaaatcacatctaatttaatatggctgtctttttgccttagctgtcagtattctatgatctcaaatcactgtttggttgaatcaaattcaactgcaataattaaacagtaccactaatttttttggtctataaaacaagaaattaatcatgtttttttacctttgttaacctgtttctattgtgtttaatctgaaaagctttttcaataaattaatggaagtaaatgaggtatccataagcaagaaagtgatcttagagtagtgatagaatgattcaagcaatgggaatattattttaacttcttttatcagaagccaataagtagctagtggaaaaagaaatttcacaaaataaatttggaacctaattctcagactacgaatttatgctcacactatttctccaagctccactatagaattatgtcacttatctactaggttagtgcaaaagtaattgcaatgtttgccatttgaaacctaatattacatttttccaggtactgttaaagaacaaaccacttaccacaccctattcccaccatattaaaacagcataggctcacaaaggaaaaaaatgaaatcagtttcaaagtcagagctgagcttctacttataattcctttacatgtattataaagtaaaatattttataggtattatacgatataaaagatgaagaataaaacattgtttggttaccagacaaaaaaataaatcctataaagcaagttcagattttaaaacaaatcagatggtgtttctgaatatgtaaaataaatttctttaaaagatttggaggcataaaagctagatttaattgcagatttaaaagatggtttaatatcagaaaatttattatattaaatgcaagaaaaataattgttaaattaaatattcatttgagataaaaagttttctgtattactcaggcttctccagagaaacatgatggatggatggatggatggatggatggatggatggatggatggatacagagggagagagagagaagacagacagagactgatagatatacacacacatatatttactgtaaggtataggctcaagtgatcatggaagtaaagtcccataattttccaactgaaagctggagcctcaggaaagacagtgatgtagtctgaagacctgagaaccagagagccaatggtatagattccagtatgagtctgaaggcctgagaaccaggggaaccgagggcaagagatgagtgctacagttcaacggttaggcagagaatgaactcagctttcctccatctttttgttctattcaggccctcaatagattggatgatgtccacccacattggaaagggccatttgcttactgagttcaccattttaaacgctaatctcttcgagaaacaccttcacagaaacaacctaaaataatgtttaaccagatatctgagcatcctgttgcctagtcaagttgacacataaaattaaccaccacaccttcacaaacaaggagtaaaggaagcatctctacccaaatacagagtaatgtagagtatctcttaagagcttacagcatatatcacaaactaaaattttagtcacattaccattaacataaaaacaaaaagatatatatctattccgctgcttctctcatactgctctagagataatagtcaatatcacaagactacttgaaaaattttaaaaatatgtattagaaagcattacccatatctgtacgttatgactgccaaaatagaaaattttaatggattctgtagcaaattattagaagatttcaaaagtagcttgttttaagactagcaaacaaaaactacagacttcctatagacaagtaacaagcatttcaatactgaaacagagagagagagagcaagagagagagagataacgtgagcctatacacactagcaacaataaaaacatacggtacacaggggaaaatgtgtataatcacattacggggaaaattataaaaccttagctctatgtaatgaaaagtaattccatgttcacatgtgggaaaaaaatataaatacagcaaatttgtggcaattaatagatcaatttgaagtcattccatagagtttttcatagaagttgatagtgtaatcttgaaattcatatataaggccaaagagccaagaataacaatgataactatgaaaagatagtacaaggtagaaraacgtctcctgccagatactgaaactatcattattagaatagcatagcattaggccaaagacacgcagctagactaaaacgacagaacaaagagcagagaaacagatccatgccagcatggacatgaaatatcaaagagatggcatcacagtcagcagggggatgatgggggaaaagtaaatccctacccaagactaattacaaagtaaatggggatttacttttttcttgtcttcccccaccgatgtataatgccaccactaattcctgattataatgccacctcaatttctgacaggtaagacctaactgtgaaaagcaagatgtgtagatatattagaggtataatgccgcctctaattcctgatctgtaatcctacctcaattcctgattgattagacctaatgtgaaaagtaaaatatagaaaaatatatctttataacacaagagtaagaaaattcctaaacaagaaaaatacctatgcctaacaaaacaaaaaaactctgccacatagaaattaaaatttttgtacaaaaaaaacacatgagcaaaattaagataagccacagacgagatattttcaagacttatgacaaacagatgattattatccagaatataaaaggacacctacacatcaacagtattttttttttaaagcttaatgaccaaaaagaaaaatgagtaggatagaaacaaacatttcacagagggaaaatagtcaatatgcatatgaaaagatgttcagcctcagtagtaatcagggagatgtgcaataaaacttcaaggagatgatatttggatatattaaaatttacaatcgaacaataccaagttttatgaggtgagctgaaaatgaaacattcttatataagaacgtcagtgagtaaggaatgtataagtgtataaaatagcaaaactacttttgaaaataagctgacaatatttagtaaattaaagaaatgtataccaaagacctggcaattccacttctagttatatgccctaaaaaatctgttgtccatgtggatagggaagtatacataacaatgtcctgatatcggtacatatagcaagaattgaaaagaacctacacagccatcaatagtacaacagatacatgaattatggcatactcactaaaaaatactacacattgtatacctacatcagagttacatatataaatatgaatgatctcaaaagcaacattgaagaaaaaaactgttgcaaaatgacatagaatgataccaaattttatacactattaaaacatgaaaaacactatatatatttatcaatacaaatatatgtatcaaaatataaaaatatgcattatggaaaaatgatcagtaaattcagaatgataattaactcttggtagtgatggacacagcctcacgacaaggtatacagtaagttttaattatttttgtaatattttttctttaagaaaggcagagctagaaaaatgttaaaatacgataaaactggatgctgcaaacatggatatatgttattattctctatcatttgcagtgttttaaaaatattttctaacaaattaagaaaaattattttttaaagtctaattaagcacaatgaactctaggaagtgttcaatcctcttggccagaaaggaataccacaaagaaataaaataatgtttaattaattgttataatatgcaaccatctttgctattgtaaactcttcaaaaccctttttcattaattcacaccacgtatgtcagccttttgtattactaatcctagcatatgattatagattagtcagtctactttgtaacatgcttaattacccagcaaatctccattctctgtattgttttgccttatattggctatagggtatatttaactgtttcctgcagttcttcttgcagctgaaaatttcatacctgggttggctgatatttattaagtttaaaagaaagtaaccttcatggttacaacagaattgtgagcagtatcaggccttcgctgagaccatagctcctatgtgtagcttccatttcttcagttacacaatatttttatctaagtcaacagcctgtgcaggcatcttatgatatgaaatgataagagaaaccagctacatagactagggaaaaaatatggaatgccttttaaattgttacaagaaaagaaagaacactatacacaagaggaaactgaatatagaaaacagagcatctcaattctgttctgccactcactgtgtggccttagaccttaggcaacccacttccccctctctcaacctgggtttactcgtggagataatgacactgccctgcaaatctcacaggactggtgtgatggccaaaagagatgatgcatgaggaagtgctttgtgaactgaaatgcatttcagaaccacaagtgagaatgycattattctgaccctttcagaactaaagagtatactggtaaaatgaatatactaaaattctttgaaacaaatagattaaggaaaattaacttaatggcctcagcaaatgatggtttgtacatgtgtgagtctatctgtcacaggaaaatttccatgaaaatataaacacctgctaatgacattttagagaggaaccctgttaaaagtagaagtatctaaggaagttgaagaaaggtgttttaaataccatcttccaaaattactcaagtagtaaactaaatgatgattgcaatttgtgtgcaaagactaaggtagatacttggtgacagagggtgacaagatgcagaatactgtgtgttgctgttttctttaaagcagtggctcttaaagtgaactcaatggactcctgagatccatgagaacctttcaggagttcatgagggcaaaattattttcataatgatattaaaatgttatttaccctttttgatatgttaatattttcacagatgatatgaaagcactggtgggagaactgctagcagcttagcataaatcaaagccttggcaccaaactttactgagtcattgtactcttcactgccatgcactgtcattaaagcaagcaaagtctgttttatttaagaatgtcttcgatgaaggagtaaaaatcttagttccattatatctcaaattaaatgtgttttattattctgtgtggtgaaatggcaaatacacataaagcactcactgcaactagagtacaatggttgtttaaggaacagcactcctggttgtttccgttgcaagctgaactagccacttttttccaccaaacactttttacttaaagggacaactgacagataagctattattatttagacttggatttttggcagacattttcacaaaartggacaaagttaatctgtcacttcaaggaaaacaactgacagtattcattaccaatgataacattaaagctttcaagcaaaaagtagaagtttgaaaaacttacatctgtcactgtgacagttataagaaagccttatattgccactgtaagagcttactaatatcatgacttttctgatgcagcagtagtaatattaataaatgggatttgtttatgctgtataataaaatgcataaacatttggaagatatataacccaatgaatctatattttccaaatgaccaatacatgcatgggtaaaagatttattcaaggtgcaagataaaccaatggattttggagtgagaaaatacaaaaagttcattgatatggcatcagattccacactgtaaatagtctataggaaagtactacttattgagttttggtataatatcartataatatcaaagaagaatgtcacaattatccatcaaaagtgctataaaatactcatcccttttccagtcaaaatggtgagatagagccaaaaaaaaaaaaaaaaaagaatgggtggttaagtggagtgatggagtgcaaagtaaattatccaattccatcacatggttccttaagaagacttgtgcacattacaatacatattctgacttgcatgttgtttcagtgtgattttgcttccaaaagataagacttgttaagtgttcttatgccctcaggctactatagtcactttatatatccccctaactggggataagcatctcccctcctgtacccctttatcatccttaggcagtggctggtagggatggaagtatgaacatctacctcatttaatttgggtttgaacagacaaataattcatactccagagctctcatgaaggtttagactaaagctatccttgaaaagactttgcctaaaatcatacctcttcttccccattccctttttttcccattctgtcactccctaattgattactcctttttttgttttgttttgttttctgagacagggtcttgctctgttaccgaggctgaagtatggcacaatcacggctcactgcagtctcgacctcccagattcaaccaatcctcctttctcagcctcctcrgtagcttggactacagccatgtgccaccatgcccagctacattttattttactattttatttttttattttacagacaaggtctcactatgttgcccasgctggtcttgaacttctggctcaagcgatcctcctgcctcagcctcccaaagtaccaggattacagatgtgagccaccatgcctggctgtttctcactttcttaataaattacttgcaaacaaatcctcatctcaatgtctgcttctggggaattaaacctctgagagctagcaacaggtcattctactgcttgatcattgcgctctttgattttctgctaaatgatgatcaattcaactaccacagtaatgggrgagacaatgtaaaatttctctttatagcaacataattatagctaattgtgaagtgaaataagaaataaattttaactctggcaacaataacaacaaaaacaaagtgttgattatgatctttgattcatttccccaaaaagggcattatcaggtacagtatctttgagtctacaataattgtaacatgctttttggtaaactgactagaaggaaatggaagtaatatagcaataatacgaagggacagaatggagagagctacatagaaaatacatgagcaaatttattgttcaagataataatcagtggagaagacaagactggaaatgccagtaaaaaggggaagtgattggtggattcatatccctgatgaaataggaggaaacaagataaagaaagaaggcaatggataagagaaagaatgaaaacaaataaattgctcaggtgaataagaaggggtgggttgaagctgcgtaaggggctttcaatggttccagatatcattctctggcattggtagcacagaatgctgcacttgccacacaccaccacctggtttcaccttgcaaacagccatacagtgctccatttacacccacacacatttctcacactattctgcattcttccattaccactacttttttatctccttctccattttctatatttcatttgctacccgaagtattactttaagagattcccaaacttcttcttccaatcaatacatgttcccagaaatcaataaggaaagatggaagtagaatatattataggatatctccctgttttcttttaagcttcgactataaggattagttatttttacagcacccaagagraaacactagtcacaggaagcagttccatatgaaaccagatctatctaaaactgcctttgccagtcccaaaggacaatgttgaaaaggaatcccaagaaataaatgtgtctacaaaattcagagcctataaagacaaaaactgaggagaaacacttaataaagctactcccatactctgcataagccagaaataaaccactcctaatatggcaaccacacaataaacatctaatgctcagaatgtttgtcaaaagtatgttggtcaaatgtactatctttcaacatttaacattttatcaataaagaattcctagaaacagaattctggcatctacaaaaaatatatatatcacatagtaacccattttaaagttaatccagagtggtatttataacattttgagtaaatcaataccttggaatgatatttcaaaaaccacttctactattaatctgttgtctcattagttgtatttgttacagaacctaatatgacaagttttgatttcgacagcatgtagtgatttcagaaccgattccattgaaacctagccataggccacagaaatctatcagaaataatgtcaggattgacttcagatgggccaaccaagaattccctcattaagagattatctgctgttgaaatacgtttatgttcatgtttaaaacaaacatttctgaaacacaaaataattctactcctctatattcaagaaaaggtactaaccacaagacaatagcatataaataaaagccacaaacctgaaaggctgtcaaggtggggacaggagcacttggaacacaggctggaatacaacatgtgtctggctcaagtacttaacttgataaagtcaagtctatttctatcaatttgtattaggagatgaataggttctcattaaaaaaaaatgagactcaaaaagaaaaacttttattaaaaaaaatcaaaggtgtcaaatctggaaatacctcccaaaagccaggaaacactgagttctaagcacaagaaccaagacagcttcctgatggtccttgagaccagatggccaagaccagtacagacccmcaggtcccatctctcaagtgtgtgttagaagtgcaagaagactggggaactagtctgcagaagtatccattccgagaaactgaccatacataaagtttggtgagttttgtatgaaatttcctctattgggcaatggcagcatttatgcctctgaaactttgtcaaaaatgcataaatattctatagttatttgcagaagaactacatttaaatatagcatatcctatggctatccatcttcttggagttaacaaagggtccccaccatcttaggtgaaaggtattttacaatgttataaaaaaaaattaatggatatatgtaaaaacaaaggtaaaataatttatacctttcaaaaatgaccaagaagtaacagttaaacatggtgcaaagaggtaattcaataaacactagcaatgcgtgtgtgtgtgtgtgtgtgtgtgtgtgtgtgtgtgtgtatcagcccgaaacctcagaattgctagtttttttaaccacttactattaatgtcatactcaacccggattttacataccaacaatttaccaacacactaacagtttacaaaacatccagttctacgcggttgcctttattacaaagtaacttctttccacactgatgacagatataatcaaatagaaacacaaattaattcttaatatttttataatacttttttaaaactactgatttaataaccctcaatttccctttgaaaggaaataccgagagtatttaatgtatcctgaccatgaaacagaaacttaggatagtaagtgatacgtatgtatccattgatacaatctgtatcatgatacatgataaaagtatgtgaaatgattttatcagtttcaggtatgcaaatcacaatcaggtgatcaaggtaattgcttttccttagggttgaaattatccctggtttctgataggaaaagtactgtggaatgtgctaaagtggttccaaaggttgccacaccaactcaccctactcacattcccaccgtctccttccatctttctagggttgattgtgtggtttaagtgattgtgtggtttaagtgcttaacttaccattgggagaaacctcaacaatggataaaattagatttagtgaagaatttccaggacatttgactaaaagagaaaaggaattatcgyatatattaaaataattcatatcattagtacacaccacacttttccatttcagaggcaaatgtttgataaagttcaattagaatcattttttcacttagttggaaaatgattctaaactctgcccaaatatgtgggaatgttacattggagaaatgctcagaaaaaagcccaagtgtaaagaacggaagattatgtaagctttggtaaaaatctctgtgttacattttctcagctcttaaatgtaattccaaaaaagaccctggacagtgtggtatgggctagcatatggtttattttcagctttatggaacaacagggatttgcaagctttgataaattcccaactataaccacagaagatctcttcggatttcaccaaatagaaaacaaacaataatgagttgctggggtgacagggtctttatttgttatgatggcatagaaaaagaaatgcgtgcctagggcatttgttttaatcatgaaaatggggaagttagtgctcagcattcttcattgctgggtcattcttacagccaatttaattaatgtgaagaacagcttcttgtcttgtaaataattcatttcttcacttcacaagtatttactgaggtctgataccaattcaaacactagcaaggtcttccatactttagatcacacaggaatttgaggaataaagagattcaaaagggaagaaatgcagaaagaagtgcaacaagatgaaatacttagtttactcctaattttaagacagttactatgttcataaaagtgttttatgtgtaatttcaaaaaaactttaaataatcaaatcccatagtttatcctgaaagaaaataaacatgggaaaatgtcagctttgtctgatagaaaactttaggcttaggtggtggtatacatttatttattcattccaccaaatatttttccaccaaatatttattgactaccatacaggtggcaggctcagtgccaagctatgcagattttaaactgaaagctgctctcatggagctttcagtttactgagagtgtatgagagcaagaaacagtaatcaaacactaatgagtgtgcaattacaaactgagatatgatctaaagaaaggaagcacagatatgggaatatttgtaacaaaggtacatgtcttaggcttagggttactgaggaaggtggatgatgaaaaacttctttgaagaagaaatgctggaattgataactaatgaatgggtgcaaattaatgggaagggagtgacatctgacaaaggcaacaaaatgtacagaagccctatgatgtaggtaaataagtagtggctgtgtgtgtgtgtgtgtgtgtgtgtgtgtgtacatataaacaaaaagaaagcttttataatactgaaaccaataaattttcagatgtcctatcagcaatcagattacttaatctatctgcctttgcaagtacttaacaactgacaagaaagtgaaacatggatctgtctccatttctcaaatgcaggaggtaaattattatgatattttacaccatcatctatttgctgctactacaattaatgcattagtgcttaacaaacttaatactttttatgaaatgaaaatcataatatcaaaaccccatcttgcacaactgtagccttcactcttaacagccacaggtcttctttgattttcccaaaaaggcaagctctatccccactaaaggtatttacctagactttctcccaaatcttaacaagaaaaaataattcctaatcacgcaccggatctcagcttaatgttacttctccaatgaggtcctccctgcttgctcattctaaagtaggttgctgcctggttttttttcccctctcataccagttgtcaacttagtgtgtttatttgtttactctgtctttcacaatgtaaatcccatgagataaaatattcatgactattttatctaccaagagcaacacatatgttaggggcttagtaaatattttttgactgaaagtgaatgaataaatgatgactgagtactgaagtaacataaagtcagagaactatgaataaatatgtattataatcttcataaaaaactctataagtgtaggcaattcgaatataactgaaacactcttctgagattttctcagggaatatcatatgatacaactgtcaagtataataatttttttctataaaaatcaccgccaaatttcagtgcactatctaggaagtcaatctgaatcttaagacaattcaaactggaaaacaggaaaggagttctcaagtataaaagccctattaaacaaaattactttcatacatagagacttagtatcactcataatttaaaagaaatgtttaataaatgtgtactagattaataaatatttagtatttctgtattttctccacaattttaagtgtagaaaagtcacatgaatttacatatgattcttcaacacaattattgtttttatgaactttaaagaaaagtcaggatatagaatttttcccaaaaaatttataatattctcccagaagcagcttagactcatgtatagaatgaagaatattcaattaggagaataaagaattcacaaacaccaataaaaatagcccacaaatcacacagacattaataattagttcactatattgattcattttggagggttttttttttttttttaagaaaaacatttaggtatgtgtgaactcaggagtcataacctgcaatgaacccaactctgtaacacaacacagataccacagatggactgcaaaggccagtcctgaggtyagctagatctgacatggaaattttcaattttctgaaccaataaattcttttgttaacttcttttttgttagcccaagttacattagatttttgacccctgaaatcaaaagagaattaaccaataacaaatactaagaactcttcactcttcacactctgagtcatcacttccttctccattccatcgcataggatgttttcagaatgacagtattaaaatgaaaatgtgattagatcattcactctacagtttctccttgtttacaagataaatattaaccctatagcttatctctgctacctttacctccccacctaccattctaattcatacacactgtaagccaacaattctgaacatttacccattctctgtgtctgcaatccccttctcagagtcagctcctctggaaaggagttaccttcctcctcaggcagcattaatactggtacgatgtactcccaatgcatcttgcttcgatctcactgtattgcaatttctgctttgccaggctaccacctacccctactagactataaactgcttcaggtcagaattcctccatattcccagtgaaaacactgaacctaactcatcttagatgctcaataaatgtctgctagatgaatgtacactttatccaatgaacgtagattacattcaatgcatgcacataagttagccactttttaaaatgagtaatccctttacagcatgattaataaatacaatctctaaaataatagtttattagtaaaaatggccttatataattgatggttaaatactttttgtatataaataaatgtgatctcatttttaaaatgtcacatttcactccctgaaataaagacctcaaattgctttttgtaataatgtaaggttcaaaatactctctaacatttaaaaggaaatcagaatttgaggaaatagtcatataaaatcagtggtaattgacaaactgactatataataatttcactgagatgatttctggtattaaatgaatgaaaaagataatcgtaacacagaaaggttattcaaaaacttgactaagaaaaaaagtcaccaataattattttattcagggagtaaatgttattaattgccaaaatacgaattttaaatttgagaagtacagatttgtaagtatatatttgtttgaatagtatcagattggccttttattggcttattggtatttagtgccagcacttacaatgtgaactcagcaacagaagataattcttatgaaatcaacattcaacttacatgaaataacttaaaaacttaccaacaatagtctaatgattatatacctttaccaaacaatgtctaatgaaagtccaaatgtaaaaatttaaaaattaaaattatagaatataatttttacacatcaattgttttgtagcaccatctcgcaaagtaaatatcatgtttattctgtagctaaaatttctccccacaagcagaaattgtttggaatatacaaaaagacaacccattaacaagtaactttaagtaatgtagttggatggtcattataatacaaatggtgctataaatttccctttaagtattgttttagctacatcccacaaatcttgatgtgttttcattttcattcagttcagttcagtatttccttaattcttcttttatttctttcttaacctatgggttatttagaggagagtcatttaattgacaaatatgtggagattttctacaagtctttctgttatagatacctaatttaatttcattaaactcagataatattctttgtatgatacagatgccagttacaccagattcatagggttgttcaggtcttctatgtctgtatctatttctgtctactctgtccatcaattactaagaaggaatatttaaatctccaacaaaaactggatttgtgtcttgctccttgaagttctttcagattttgcttcaagtattttgatgctgttattaggtacataaatgctgggttttatgccttcttaatgaactaacccttctatcattatgagataatctcttttttccctggatatatacaatcatgattggatttgaatctacccttttgctacttgttttctactgcttttatctgccctcagcctcttttctctctttttctgcctcccttggattaactgcatattttatattattccactttatctgctttcttgacttattagctataattcttttaactgttgttttagtggttggttcacagtttatacctttaatttatcatgaactgtcttcaggtaatattataccacatcatatatagtataagaaatttacatcagtattcttacatttccccctctcccagcctttgcactactactattataattttacttctatatatgtcacgaagtccacaatatatttttattattttttacttaaacagtcaaataactttaaaagagtctgtaaggggagaaaattaccattttcagtgttctttattcctttatatagtccaggtttctaactgataacatttttcttctgtctgaagaactttttttagcatatctttcagtacaggtctgccagtgaytaattttttcatctttacttcatctaaacaagtttttatttcatctttatttttgaaagatattttcactaggtataaaattccacattgatggccttggacagtggctcacgcctgtaataccagcactttgggaggctgaggcaggcagatcacctgaggtcaggagttcaaggccagcctgaccaacatggagaaacccagtctctactaaaaatactaaattagccgagcgtggtggtgggcacctgtaatccccgctactcgggaggctgagacaggagaatcgcttgaacttgggaagtggaggtcgcggtgagctgagatcatgccattgcattccagcctgggtaacaagagcgaaactccgtctaaaaaaaaaaaaaaattccacattgataatttctctctttctatagtttaaaaatgttattctactgcctctgtgttgcactgtttccaaagcaaagactcttaaccatctttgttactctgtacctgatacgtctcttttttttggccttcttttaagattttctcattatcactggtattagtttgattataatatgcctctgtatcatcttcttgtgcttggggtttttttagtttcttctgagtttatagtttttatcaattttctttcccaccattttttcaaatatttcagtctaaaactctcccactttcctcctcttcagcaacttgaataacatgaatactgaggcacttgaaattgtcctacagttcactgattgtctcttttttaaattagccattattctctctgtggttcattttgggtagtttctattgttatgatgtcacctcattaatttctttctttgtagactaaactgtcacagatccatccagcaaatttttttcatcttaggtcctgtaacattcatctctagaatatagatttaagtctttttcacatcttccatttctgtgcttaatgtcttcaatctttcctctccttttttgaacaaattaaatgtgacaataactattttaatgctttgtctactatttctctcatttgtgtttttttttaactgattgatgttctcctcattttgtgtcatggtttcctgtgtctttgcattaaaagtaatatttttactagcttccaaacatgattttcaccttttggggtgctamatattcttgtgtcctgaggaacatccttgagctttgtttgagaaaacagttaagttacttgggaacagcaaatcctatagaagttggcttttaaactttgttaggcaaaactggcacagcctttaatctaggggtgaatatgctccactactaggcaatattcttctggttattctatctgatgcttcgtgaattatgaggttttccactctggctgatatgggaacatgaataattcccagccctgtataaattctgaaaactattccctgtgttcttttgaggtgattatttctccagctttttgtaggttccccacatactgatgggtcctcagctgagggctgtacgaggaccttctgcatatctatatagttttctctctgtgcatcttctctccagtcagtactctgtcctgcaaactctagccacctggacttccccagactcccaactctgtctcgtcaaccctagactaccaacattcacctgggttctcctccctgtgctgggccctggaaaaacctctcaaggcaatcagctggtacaatcaaagggcttacctcatttgttgccattcttaaaggatcactgtcctgaactgtctgatatttaatgtctgaagactccctttcatacggtgtatctggtcttttttgtttgtttctggtaggaaggcaaatcatgttcctgtaaccccatctaggctgaaacattctaatacaattaaatggccattctctgggaatagaaagtaagaacttacaacagtgacgtttccataacacggaatatataataattttcaaatggacaaaaaagaacaaataatacccaaaagaagaaacttaaatatcctagttgatggaataaatatttccacacccagatataatgtctcacacatagaaggctcaaaataaatactaaattcataattccttgctttgaagctaattaaaattagaaaagataattcagtaaaaggaagaagaaaacaatgctatcctgtgccttagatactgagtaattaattcaatttgatgtcctataagaataattcataaaattgtgtattgtgtcctgttttgatttactggaagattacaaactagcatgccatattcacatgtattttaccttcatctgaaataagttaaataagaatgattttataatttgtttctttcaaaaagttattttttggcaatatttaacatagtataactaagataaactatatattaccttgttaatattaatggttaatattaattttaataaccatatatttaggcaagatttaaaaactacaaaatagaagaaattaagcaaaaataatttaaaataaagcattactatgactataatatttacctataatcatagaaattacaccttataaatgtatataatctgtttctttaaaaaaaaaaactttaggacaatttctaccatcattcggagggttcaattagtccaatctgctgtttaagatctagaggctttattcagagaataatgcaaggtcagtcaccttagctcatgagctctaaagtaaaatagccttcaagataaataacacctctataaattacttatgctccctaagctttactttcctgatctgtaaaatggtgataatggtatctatccaataaagtagctgtaataataaaagaatgcacaaagagcacctaacatagtatttggcactaagctggctattattttattaagtttaatgttatgctgcctagaagtaaagcccttatgtgaagaagatggactccaaagctgcattgtcttatatcctattctcaaacattaaggtcagtcttctggtatgtcaagctgtaatttctgaggctgccattagtattgcttatggaaacataagaccaagtaaggacacataaagttggagtaatcagaaaacaatcctgtaccataaggaagaagacaggctggaagtctggaaatagatgatgtattacagggtagagaaggtgaaaagccaaggattcaccctatggaacctgtaaggttttaaatctcggctccaccagtttatttatgtttgactttgggcaagttacttgaccctatctgtaaagtgaagacaatagtaataattactacatatattgttaagtttcactgacaatacgatgtatcactcactcactaactgttaatattataaaagccaggaagattggagagttacaaaagcatcaaatacaaggttatagagatggattttttattaagggaaggagcagattccagggtcaatttaatataattctgtctctcttttaagacccaatcacaaataatgaaaaagaaaggttttagagtgataaaagacccctcaaaaggtaaaatatccatgcatgaggatagctgttatgacataagctgaagtgaaagctgatctaacacacacttgttacatagaaaaatagttctaatattttttgataatttggaatagggtgtggaaaagtaaaagttttgcagtcagacagacctagcttgagtagcttgagttcaattttgccacttagtagttgtttgaccttgaataagttcattatatcctctgaaccctaattttcacaactgtaagacaggcataacaacaactgcctttcagaatgatactgaaaattaaatgataaagtatgtaatgttcttgccataattgcaataatagtagctttcactttcactatttcaccaakagtgaaaaccattcccaaagaaacaggaacctttccaatatctctgccccactctgaataggacattgtttttgttgtaacagaccatctttctcatatgtaaatctgaactaattccaggtctctgtcaatttgaataatgagttcaaatccacatcctgttcaacattagttaatttgytatccaaactatcgctatgagtaactactactttactttccctgaaatcacctctttctcttattttccttacacatatgtcacatataatattctttatgatcaagcctcaaaagccagcattccatctcctaggccctaatttcaacaaagtctattcaaacgaattaacaacaaaccattgttaattttcacaaactttcgataaaatttgaatttaatgctctcatacttaatgacaagacaaagataaaatgtgcacraattataaacacctccttggttcaatctatcatatttaccaaaatttggaaaacaaaaataacactctctaaaggcaagggttcttaatttaggtctagttgattatgatagaaaacagacaaccacatgatgcagaatatcaacctgataagaccaattctttgtaatctctttatctctgatgatcctttatgcaatccagaaaacttaatcttctcccacattttcaactgcctgtgttttactgccaactctgatcartttggcaaaaagatgagagcagcaatcactggaaaaaatgtagggggaaaaatgagccaaatcaactgattttgtttcaatagactatttaatctgcccaatgagcaagcctaagtgttcttgctaaaggtaattaagtggtattttgtaattcctgttgttctttttaaaaggtcttgttttaaaagtgttttaaaggtgttctataatgaaacactttttgtccttaaggaaacaccttttgtccctaaggaataaggtagaaatagatgctaaagtaataatttggcattaccaccttattgtcacaataatggatgttttgacattgacaatagatttcctcatttgtacaatcaaaattcaatttgaatagagttttagtagcagctcttaaggaaacaaagggtatcaataatatagaatgtttccttaaggatgtatagctactgctatgtttccatttcttctagtcaaaaatcaatgtcacactaggctataatgaatggctgcttgccagctgcacttaaactgacagaaactcatcattcctttaaaaactgttcttctaaaaagagtaatttaataacttgacttatttaagtttgattcagacatacaatctaaccatggcttagaaggcattttacacataagaaaaaataggctgtctttattagtgttagagatgtttacaacacagtcaatttttaaaggaagaacagaaactgcagtcaattattagatacatattcacacctgttgtctgtcatgtttcaaacyccttcggtgtgagatgtagtcaaggcaaataaaacgaagaagaaccagctgcaaaaactgattttgttctcatatggtaattaaaaggaaaaagtgtaccatgtgttgtatctacgacagtcccattacttcatgttagggacagtcccattttcttttaacagatttttgttgcggtcaagtatgttataaaggctagcacttgtaggtctaggctattgacctaatttatattggtagtctgcccaattacctttgctaaatttctccctgaagcatactagtctggtgtcagaaaaattaaacattttcattttcattcccactctaacccccatacttaagtcacacttaatgtgatttttttaacatcacactagacatcagacctagtcaggccatgtcttagaaagacaggtgctataaacaccaaatgcttttaaaatgcaaaccacagagcatctaaaactacaggtggtacagttataataaatgaacactcagaacacatgtaaatgctacactgtcatggccgtatccttctcggaaaacctttaagataacagtaacttagttactgttcgaatggtaaatattgtattatgtttcaattgtgcttaatttacgtttaaatcttactttcaaaaaactattaatttaaaatgcttctgaatattatcaataagattacatatatttaaagcatctgaaaatacactccaagtcactatggatgtgactcgtttgaggaatatataatataaaataatttgaagttaaaatagatctttacccaaaaaaggtcactttaaaaacacattcaccactgtcttctatgtattgaacataaagtatgatttgctttgtaaaaattttattcttgtacaacaacaagaaatacgcaaagatgaaaatacatatgctctggaactagacagagacagatgcaaattctggctctagagcttacaaaaacaagaccaaataaaatgcttaacaaaattaatgccaacctaacctacttggcaaggacaaccctacacatgaaatgattcttactgatacaatgtaactgccacacagaattgtttgactcaagaaaacaaaatgcaacttgttatggcatttgtagttaagtaccaagggtctagccaaatgyatattgtgctgtaacttttatacataagtataaattgtatatatatattatataagtataaagtgtgtatatatattttatatatacacttttccaccaaggaagaaattaccagattttctctgtctctggatgatttatagaactgagtaacttgaaacaaaatgaagtaaatacattacagtgggaaaaaaaagtttttacagtcaatgaaaagagatatttgcaggtattgctacggtatttgcagcctgtagcaaaacatgttgttaaagtttaaaatgtcctaacattatacgtgaaaaatatgattcacctgacccaaccatggaaaatgcctttaaccaatatgtgaaataggttttctttctagattatgaagaattattcactgagttttgcatcatagaagtgatttttttaatgaaggttaaaatgaaaacaataattcagaaaatagaatattagtttcccttaccataaacttttcctgaatatgctttaggaaaatagagatagcaaaaacaaagcagaacaaggacaggtgtgtgttgctcagtgatcagtcagttcagtcataaatcagtcccttttagacgccgattttaatgtaaagcagaagtatatcagctaggagaaaatccaatctcttccaacgttatttatgacaaagcactcctaactgaagtccaatttgtttgtggaattgcagtcattttgattcaactaaacaataaatgaatctgcctttcatagctccaactccagagcacaaaagagaactacatcacaacacttcacgatccaggggcgcagttaaaggaacagtgggaaagcagtttttggagtggggaaaaaaatccaatgagctacaaaatacaattcattcacctgaaccacccacgtactttttgcatcggctgtatttcacctagtgagctattcatagcacacaaacgagcttgctgggagctttattacaatccttcttcattctgaaggcctcgtgcatcactgaatgctggacatctcagatgaccactctaaatactcctccaattcaaccaaagcctatggcacaactagatcatgataatgattaaaaaagagaaattctgggaggctaaaaacacaaacaacagagaatttgtctataaatttataaatattcctcaactaattaagattttggactccgacatactattttctttcataatgactctatttagaaacaattattgtccaattgttctctaactcactggtatttcttaatttgttacatttactaagttgtattttaccagggaagaaaaaggagatcttaaaatatttttttctgtcatatcacaaatctctttttgtgcacttttcttgtgaaccacatgtctgaaggtgaaaaatattgttactaaaacaaaattcttattatttttatgccaactaaagagtagttgttttgagaagaaacaacaggaatttttaaatgtatggcatgacgttgccttgctcaccagccattcaatcattcccaagatacatattctgaatgtgaagtatttattatatattgaattataaaatatttattatgctaaaagagttctcaataaatactaattctctatctaaaactcttgtagaattaaaaactatgacataactgaggcatgttgacaggaatgtacacagtactagtaaattcccaagctgttgaaattttatattcttgcatggactagtaatttccacaataggttttccagtccttcatgttttacatatataattttaaaagttatatgcttatagaagtaaagtgttcaactctatatttcttgttgctttatttttttttttttttattatactctaagttttagggtacatgtgcacattgtgcaggttagttacatatgtatacatgtgccatgctggtgcgctgcacccactaatgtgtcatctagcattaggtatatctcccaatgctatccctcccccctcccccgaccccaccacagtccccagagtgtgatattccccttcctgtgtccatgtgatctcattgttcaattcccacctatgagtgagaatatgcggtgtttggttttttgttcttgcgatagtttactgagaatgatggtttccaatttcatccatgtccctacaaaggatatgaactcatcattttttatggctgcatagtattccatggtgtatatgtgccacattttcttaacccagtctatcattgttggacatttgggttggttccaagtctttgctattgtgaatagtgccgcaataaacatacgtgtgcatgtgtctttatagcagcatgatttatactcatttgggtatatacccagtaatgggatggctgggtcaaatggtatttctagttctagatccctgaggaatcgccacactgacttccacaatggttgaactagtttacagtcccaccaacagtgtaaaagtgttcctatttctccacatcctctccagcacctgttgtttcctgactttttaatgattgccattctaactggtgtgagatgatatctcatagtggttttgatttgcatttctctgatggccagtgatgatgagcatttcttcatgtgttttttggctgcataaatgtcttcttttgagaagtgtctgttcatgtccttcgcccactttttgatggggttgtttgtttttttcttgtaaatttgtttgagttcattgtagattctgaatattagccctttgtcagatgagtaggttgcgaaaattttctcccatgttgtaggttgcctgttcactctgatggtagtttcttttgctgtgcagaagctctttagtttaattagatcccatttgtcaattttggcttttgttgccattgcttttggtgtttttggacatgaagtccttgcccacgcctatgtcctgaatggtaatgcctaggttttcttctagggtttttatggttttaggtttaacgtttaaatctttaatccatcttgaattgatttttgtgtaaggtgtaaggaagggatccagtttcagctttctacatatggctagccagttttcccagcaccgtttattaaatagggaatcctttccccattgcttgtttttctcaggtttgtcaaagatcagatagttgtagatatgcggcattatttctgagggctctgttctgttccattgatctatatctctgttttggtaccagtaccatgctgttttggttactgtagccttgtagtatagtttgaagtcaggtagtgtgatgcctccagctttgttcttttggcttaggattgacttggcaatgcgggctcttttttggttccatatgaactttaaagtagttttttccaattctgtgaagaaagtcattggtagcttgatggggatggcattgaatctgtaaattaccttgggcagtatggccattttcacgatattgattcttcctacccatgagcatggaatgttcttccatttgtttgtgtcctcttttatttccttgagcagtggtttgtagttctccttgaagaggtgcttcacatcccttgtaagttggattcctaggtattttattctctttgaagcaattgtgaatgggagttcacccatgatttggctctctgtttgtctgttgttggtgtataagaatgcttgtgatttttgtacattgattttgtatcctgagactttgctgaagttgcttatcagcttaaggagattttgggctgagacgatggggtttctagataaacaatcatgtcgtctgcaaacagggacaatttgacttcctcttttcctaattgaataccctttatttccttctcctgcctgattgccctggccagaacttccaacactatgttgaataggagtggtgagagagggcatccctgtcttgtgccggtttccaaagggaatgcttccagtttttgcccattcannnnnnnnnnnnnnnnnnnnnnnnnnnnnnnnnnnnnnnnnnnnnnnnnnnnnnnnnnnnnnnnnnnnnnnnnnnnnnnnnnnnnnnnnnnnnnnnnnnnnnnnnnnnnnnnnnnnnnnnnnnnnnnnnnnnnnnnnnnnnnnnnnnnnnnnnnnnnnnnnnnnnnnnnnnnnnnnnnnnnnnnnnnnnnnnnnnnnnnnnnnnnnnnnnnnnnnnnnnnnnnnnnnnnnnnnnnnnnnnnnnnnnnnnnnnnnnnnnnnnnnnnnnnnnnnnnnnnnnnnnnnnnnnnnnnnnnnnnnnnnnnnnnnnnnnnnnnnnnnnnnnnnnnnnnnnnnnnnnnnnnnnnnnnnnnnnnnnnnnnnnnnnnnnnnnnnnnnnnnnnnnnnnnnnnnnnnnnnnnnnnnnnnnnnnnnnnnnnnnnnnnnnnnnnnnnnnnnnnnnnnnnnnnnnnnnnnnnnnnnnnnnnnnnnnnnnnnnnnnnnnnnnnnnnnnnnnnnnnnnnnnnnnnnnnnnnnnnnnnnnnnnnnnnnnnnnnnnnnnnnnnnnnnnnnnnnnnnnnnnnnnnnnnnnnnnnnnnnnnnnnnnnnnnnnnnnnnnnnnnnnnnnnnnnnnnnnnnnnnnnnnnnnnnnnnnnnnnnnnnnnnnnnnnnnnnnnnnnnnnnnnnnnnnnnnnnnnnnnnnnnnnnnnnnnnnnnnnnnnnnnnnnnnnnnnnnnnnnnnnnnnnnnnnnnnnnnnnnnnnnnnnnnnnnnnnnnnnnnnnnnnnnnnnnnnnnnnnnnnnnnnnnnnnnnnnnnnnnnnnnnnnnnnnnnnnnnnnnnnnnnnnnnnnnnnnnnnnnnnnnnnnnnnnnnnnnnnnnnnnnnnnnnnnnnnnnnnnnnnnnnnnnnnnnnnnnnnnnnnnnnnnnnnnnnnnnnnnnnnnnnnnnnnnnnnnnnnnnnnnnnnnnnnnnnnnnnnnnnnnnnnnnnnnnnnnnnnnnnnnnnnnnnnnnnnnnnnnnnnnnnnnnnnnnnnnnnnnnnnnnnnnnnnnnnnnnnnnnnnnnnnnnnnnnnnnnnnnnnnnnnnnnnnnnnnnnnnnnnnnnnnnnnnnnnnnnnnnnnnnnnnnnnnnnnnnnnnnnnnnnnnnnnnnnnnnnnnnnnnnnnnnnnnnnnnnnnnnnnnnnnnnnnnnnnnnnnnnnnnnnnnnnnnnnnnnnnnnnnnnnnnnnnnnnnnnnnnnnnnnnnnnnnnnnnnnnnnnnnnnnnnnnnnnnnnnnnnnnnnnnnnnnnnnnnnnnnnnnnnnnnnnnnnnnnnnnnnnnnnnnnnnnnnnnnnnnnnnnnnnnnnnnnnnnnnnnnnnnnnnnnnnnnnnnnnnnnnnnnnnnnnnnnnnnnnnnnnnnnnnnnnnnnnnnnnnnnnnnnnnnnnnnnnnnnnnnnnnnnnnnnnnnnnnnnnnnnnnnnnnnnnnnnnnnnnnnnnnnnnnnnnnnnnnnnnnnnnnnnnnnnnnnnnnnnnnnnnnnnnnnnnnnnnnnnnnnnnnnnnnnnnnnnnnnnnnnnnnnnnnnnnnnnnnnnnnnnnnnnnnnnnnnnnnnnnnnnnnnnnnnnnnnnnnnnnnnnnnnnnnnnnnnnnnnnnnnnnnnnnnnnnnnnnnnnnnnnnnnnnnnnnnnnnnnnnnnnnnnnnnnnnnnnnnnnnnnnnnnnnnnnnnnnnnnnnnnnnnnnnnnnnnnnnnnnnnnnnnnnnnnnnnnnnnnnnnnnnnnnnnnnnnnnnnnnnnnnnnnnnnnnnnnnnnnnnnnnnnnnnnnnnnnnnnnnnnnnnnnnnnnnnnnnnnnnnnnnnnnnnnnnnnnnnnnnnnnnnnnnnnnnnnnnnnnnnnnnnnnnnnnnnnnnnnnnnnnnnnnnnnnnnnnnnnnnnnnnnnnnnnnnnnnnnnnnnnnnnnnnnnnnnnnnnnnnnnnnnnnnnnnnnnnnnnnnnnnnnnnnnnnnnnnnnnnnnnnnnnnnnnnnnnnnnnnnnnnnnnnnnnnnnnnnnnnnnnnnnnnnnnnnnnnnnnnnnnnnnnnnnnnnnnnnnnnnnnnnnnnnnnnnnnnnnnnnnnnnnnnnnnnnnnnnnnnnnnnnnnnnnnnnnnnnnnnnnnnnnnnnnnnnnnnnnnnnnnnnnnnnnnnnnnnnnnnnnnnnnnnnnnnnnnnnnnnnnnnnnnnnnnnnnnnnnnnnnnnnnnnnnnnnnnnnnnnnnnnnnnnnnnnnnnnnnnnnnnnnnnnnnnnnnnnnnnnnnnnnnnnnnnnnnnnnnnnnnnnnnnnnnnnnnnnnnnnnnnnnnnnnnnnnnnnnnnnnnnnnnnnnnnnnnnnnnnnnnnnnnnnnnnnnnnnnnnnnnnnnnnnnnnnnnnnnnnnnnnnnnnnnnnnnnnnnnnnnnnnnnnnnnnnnnnnnnnnnnnnnnnnnnnnnnnnnnnnnnnnnnnnnnnnnnnnnnnnnnnnnnnnnnnnnnnnnnnnnnnnnnnnnnnnnnnnnnnnnnnnnnnnnnnnnnnnnnnnnnnnnnnnnnnnnnnnnnnnnnnnnnnnnnnnnnnnnnnnnnnnnnnnnnnnnnnnnnnnnnnnnnnnnnnnnnnnnnnnnnnnnnnnnnnnnnnnnnnnnnnnnnnnnnnnnnnnnnnnnnnnnnnnnnnnnnnnnnnnnnnnnnnnnnnnnnnnnnnnnnnnnnnnnnnnnnnnnnnnnnnnnnnnnnnnnnnnnnnnnnnnnnnnnnnnnnnnnnnnnnnnnnnnnnnnnnnnnnnnnnnnnnnnnnnnnnnnnnnnnnnnnnnnnnnnnnnnnnnnnnnnnnnnnnnnnnnnnnnnnnnnnnnnnnnnnnnnatcgtctgaagccttcttctctcagctcgtcaaaatcattctccatccagctttgttctgttgctggtgaggaactgcgttcctttggaggaggagaggcgctctgcgttttagagtttccagtttttctgttctgttttttccccatctttgtggttttatctacttttggtctttgatgatggtgatgtacagatgggttttcggtgtagatgtcctttctggttgttagttttccttctaacagacaggaccctcagctgcaggtctgttggaataccctgccgtgtgagatgtcagtgtgcccctgctggggggtgcctcccagttaggctgctcgggggtcaggagtcagggacccacttgaggaggcagtctgcccgttctcagatctccagctgcgtgctgggagaaccactgctctcttcaaagctgtcagacagggacacttaagtctgcagaggttactgctgtctttttgtttgtctgtgccctgcccccagaggtggagcctacagaggcaggcaggcctccttgagctgtggtgggctccacccagttggagcttccaggctgctttgtttacctaagcaagcctgggcaatggcgggtgcccctcccccagcctcgttgccgccttgcagtttgatctcagactgctgtgctagcaatcagcgagattccgtgggcgtaggaccctccgagccaggtgtgggatatagtctcgtggtgcgccgtttcttaagctggtctgaaaagcgcaatattcgggtgggagtgacccgattttccaggtgcgtccatcacccctttctttgactcggaaagggaactccctgaccccttgcgcttcccaggtgaggcaatgcctcgccctgcttcrgctcgcgcacggtgcgcacacacactggcctgcgcccactgtctggcactccctagtgagatgaacccggtacctcagatggaaatgcagaaatcaccgtcttctgcgtcgctcacgctgggagctgtagaccggagctgttcctattcggccatcttggctcctccccctcttgttgctttaactaaatatttacaaactgcttataaggaaagaaaactatccatttagaagagaaagtcatatttgtaattcatcacataaacagaactaaaggcaaaaaacacatgattatctcaacagacccagaaaaggcctttggtaaaattcaacatcccttcatgttaaaaactctcaataaactaggtattgaaagagcatacctcaaaataaccagagccatatatgataaatccacagccaatatgatactgaatgggcaaaagttagaagcatttcctttgaaaacaagacaaggatgacctctttcaacattcccgttcaacacagtattggaagttctggccagggcaatcaggcaagagaaagaaataaaggatattcaaacaggaagagaagaagtcaaattatctttgtttgcagatgacataatcctgtatctagaaaaccccaccgtctcagcccaaaagctccttaagctgataagcaatttcagcaaagtctcaggatacaaaatcaatgtgcaaaaatcgctaacgttcctatacaccaacaacagaaaagcggagtggtgaattatgaatgaactcccattcacaattcctacaaagagaataaaatacctaggaatacagctaacaagaaaagtgaaggacctcttcaaggagaactacaaaccactgctccaagaaatcaaaggacacaawtaaatggaaaaacattccatgctcatggataggaagaatcaataccaagaaaatggccatactccccaaagtaatttatagattcaatgttgttcccactaaacgaccattgacrtttttcacagaattagaagaaactattttaaaattcatatgaaacccaaaaggagcctgaatagccacaacaatcctaagcaaaaagaacaaagctggaggtatcacactacctgacttcaaactatacaaggctacacagtaaccaaaacggcatgatactggtacaaaaacagagacatagaccaatggaacagaatagggaactcacaaataagactgcacgtctacaaccatctgattttttacaaacctgacaaaaacaagcaatggggaaaggattccctatttaataaatggtgctgggaaaactggctagccatatgcagaaaattaaaactggaccccttccttataccttatacaaaaggtaactcaagatggattaaagacttaaatgtaaaacccaaaattataaaaaccctagaagaaaatctaggctattatcattcaggacataggcaaaggcaaagaktttatgacaaaaacaccaaaagccacagcaacaaaagcataaattgacaaatgggatctaatcatctacagaacttctgcatagcaaaagaaactattatcagactgaacagacaacctatagaatgagagaaaatttctgcaatctatccatccgacaaaggtctaatattcagagtctacaagaaacaaacaaatttacaggaaacaaacaaccccatttaaaagttggcaaaggacatgaacagacacttctcaaaagaagacattcatagagccagtaaacatatgaaaaaagctcaacatcactcatcattagagaaataaaaatcaaaatcacaatgagataccatcttactccagtcagaatggtgattattaaaaagtcaagaaacaacaaatgatggccagattgcagagaaaacacttttacactgtttatgggggtgtaaattatttcaaccattgtgaaaaatagtgtggcaattcctcaaagacctagaggcagaaataccatttgtaccatttgacccagcaatcccattactgggtatatacccaaaggattataaatcattctattataaagatacttgcgcacatatgttccatgcagcactattcacaacagcaaaaacatggcatcagcccaaatgcccatcaatgacagrctggataaagaaaatgtggtacatggaatactatgcagccataaaaaggaaaaacataatttcctttgcagggacatggatggagctggaagcagttatccttagcaaactaacacaggaacagaaaaccaaacaccacgtgttcttatttataaatgggagctgaatgatgagaacacatgaacacagggaggggaataccacgaactggggcccattgatgaggatgggggagggagagtatcagaagaatagctaatggatgctgggcctaatacctgggtgatgggtttatctgtgcagcaaaccatcatggcacacatttatctatgtaacaaactgcacaccccccagaactaaaaataaaagttgagggggaaaaaaacataatgtcattgtgtcacctctatcttcacgagttttattccctaatattaaacttgtctaaaggtttacctaataaactctctcctgaaaaaaaattctcatgtcactgaaaattgacatgaacagaaaaaaagaaacagattttgctttaaccaagtaaaaagaaagcatttctctgaatattaccaaatcatcacttctcaaaataggtcatttgggagcataaaaaaaaaaaagtccccttcttttcaaagttcacatgcaggataccttcccttttgagtgatttcaaatgatgcatggagtattcagctgatggtatgtatgaaatgtaggcatcatcaaccaacaagcggaaacaaactcaaagtgtatgtacgtagcatgcacatgcaagcacccacacaaatgtttaagtgtgtattggagtaatctattagaaatatgccaatggaaaaagttctgaattaggcagtataaaacgagacctggaaaatggattcaacagatacaaattattatggcagataaacaagtaccctaaatattgtcataagtataatttaaatagctgtcatatgattggagaagagaaagtctactggacaatgtgattggaaaaaggaaatgtgacaaggaataatttggaatgggaagcagaggagaaaaagaataccagcctctgatgaataatacgtggctccaagactgcattaggtttgaagccaacactaaatcggggtccttgagcatttaaattaaaattctatttttgagaacttgtgaagaatctacttaaggttagtaacactggcataatatgcaaataattatgcaaacatatcttttgatattgtttcagaggcatgaacttgattttcaagayccaaacattagaaaatgacattttctattgcatattctaaaaccttagagttttactcaacattacatttaaaagttacatggttccaaaactgacaatgtcatttataagagtaatgtaatttataagaactatgactctgtttgtatctatatcaaattatttgtttaaaagtaaaaatggcattagagttataaaatgttcatagattttaccaatattgcctacgcttcttctaatttctacaagtgtttccaactttatcataaatataaaatatggtgagaaatgaaatatggaaaagacttattgtaagccaataaaatttaacatgataaaggtctcacctggagtatttaagggggagaacatctgttattcctccattaaaattaaatatttctccaaacacaaactactaaaacttcagtgttatcagagaattatatcaatgatgaacacaaaaaatgtccataatggctatttactgggtgaatactcacaggtgcagtgttaagtgtacagcagagcaaaagacagtagctgccaggactcaaggagctgacatttgggagggatgtgcatgcctcagaagagtgagcattagggagggctgtcagggaagaggtagaggatctgtaaaccagacaaaccagggtgggaaggaatttcaggtaacatgacatacaaggctcagaggtgaaaggaggctgcatatgattctatttggctgtgaagactgccagaaaataaaagtcttgagagggaggcaaggctgagctcatgaaaagtaacaccaatggtctgaggaggaaattcctctaagtgttttaatcaggagagtataaggtgtgtgttgcagaaagaacatgcaaactaattgaggtcaagatttgctaccaaatcacaaaatatgtatcaatatgtgttaaggctctcaaagactgccacatagaacttgatctaaagtcagagaattatttaggccaaagtcaaacgcctacaaaaagccaggcaagtaatgaaagtaactgaagagccccagaaaaccatggccaggaagaggtgtgaggccagcgtggcatgatctaacatttaaacaaatccagatatcagaattcttaggtgaaacatactgattgttcaataacgacaactatataaatgtgctttttcaaagcactgaagtgccaaacataatatttatggaaattatctaactccacatagtgcaaggccatttaaaaccaattcactaagaaataaaatttgtgcatcaagttacctcttatttgagctaagcatttttttccccaaaacaccctcgctgaatgagatttctgagtgataaaggctttaaaaactctgctttggtggctatgaatgatagagaaaagacttaaaatgtaaagttgcttgtctgtttcttgtcttttgttttgttttgttttgttttgttcttactgatttcaaagtaaaatgaatgatcctaagcactctggaatgatcctaaaaactctggaatgatcctaaaagtctttgaatatatgcaaatctgcaaaggggaaagtttacaaatatgagcaataacaaatatggaacatttttgttttcacctatcaatctctcatctgttaaacagaaatgaacacaaaaatgctatttcatggatgaaaactctctgaaataggatatttcgctacctaatattgtactcaaagtgctgttttaaatctggggcagactgtcagaatatctgatacctagtttattgggtaattgatgaacccaatgtattaacattttataagtaaaaagaaaaaaatcaagtcacatatatgtgcttatttagcatgtatagttgtccctctgtatacatgagagattggttccaggaccacccacatataactaaatctgcacaacgtaagtcccagagtcgtcctgcagaaccctcatataaaaaaagtcagccctctgtaacacaagttttgtatccctcaaatccatgtctagttgaaaacaaagccacatataactgtgcagttccaacctgtgttgttcaaaggtcaactgtatattgtttctgggaaaaatcttcagctctttatcaacattaacttttgcatagcaaacatatatgtaactctcaaatgtaattaacataatgcagaaaaatgtttaattatccacgatcctataaccaaatataactactttaaatttttaatctataatctacatgaatacatcaaggttttctatactgatgaaactgccagttaaatagcaattccacctccaccccaatcccactattttaacaacccccaccgatacatattttaaagcatatcttcccacagaaatcaaactgtgcaccaatccttggagacaaatatctcttctaagaatgactgcaaatatcataattaaagaaaactaacaaacttgaagttcaaattgaatgtgttcttttccatgaggatagaatgcattctcaaatacatcacaagcacaacattgacagctgcaatttgaaaatttcacagtataaaatatgtgaaacaaaagaatggtgggagaggtagtgagagaaaggagggtgatgatcatccattttacaaaaacatgctccacttaaaatgattcattatagtatttttttttacagagaagctccacctagtaacaagtggaagtttttgttaattatacactataataagagaatgaattagactataattattatagtttaaaattttaaactttcatatgcatgtatcattttaccctaataaaatcctgtaagttacacattatgtcacaagtttacagaagaggaaaatgaagttcaggaaaggtgactgggccatccaggatctgaaagataaaagagctagggatagatgagtcaggacttgaactgaggtctactctttccaaatctcatgctttagttaacacaagctttcttggaacactcagagtacagtgtcctttaataactattgtccaaaccaaaagctttataattctttccaagaaaaggttatctatctatacaatgcttctaaccagataataactcccacatagtagttttgtctgtattctattgttcaaagctgtaattaccaaggaatgtttctggaaacaacaaatgctttttaaaaaacttttcaaagatatttaatgagcagtttattccaaacaataaatcataattatctctcaaaaaattaaaatgaagcatagagatttatactatacattgtatattatttctttgggaagtatttttatttaaaacaaaagattagttgtttgatttagatagtattctagcaagcccattttaaaaaaatgttctttttccttgttttaaagtgctatgctaattaggtttattcatacaaaaacatttatttaccaaagttacacagttacaaaatggcatacataaaggttaaactttgttttgcttttaaaccaaacagatttcaagttctagatctgcaaatgatgtacatatgaactataacaattttttatttgaaaaataatgtttaaatctaacattattttctacatataacactgataactgtggttcactgtgtaagataatacatgtyattttcttcttctaattcaatttggaaaccaactccaaatgaatagaatatgtcagtgaaatatctcattgaagaaggattaacacagtaaactgtactccacatttacaaataagcagtttcattgttaaaagatgcttgcagcttctcattctcaccacagattttcactatatgtccattgttcatagaggaccatgctgcctagagagaaaagttcttttaaatcgagtaaaagggtttttctgtaccacaggataatcataagattgagtaccccaaagggaatcaaggtggctcttcaataatttaactctctgccctgaactgacacattaaawtatcatatactgtgaattcacaccctctgagaaaaaacattttcacaatacctgaattgtattgactctaaaagacaaaaaacgcaaaggcaagaagcagtttcaggtacttgactaaataacatctgggtagataatcaactccagagatctttctaaagatgatgagtccatcatttttctaagtaagcaccttaaactacctacaataaataaaagtagagtagacctacacaattatattccagccaaatgccacagcccaagtttttctctttcacatttatcaggttatgatcttaatataatctaaccagaagataacaacaagttttctcagattctaaaagagaaaaatccaacaaaggcttaacttggttggtagtgtttcacacagaactcataataattccaactgacagctgtcatactaaaagagycatcttaataaaaatgaataatatgaaatagtccatattacatattaataggggtgttattcaattactgtgttttaactgaaaattagtccaaaagcctatcattctgtaggacagactgattcaggtcacccgttactaaattaaacattttccgctttcaatgcatctcattaaacatgcaattgcaagtttaaataactccatgctttcatttacacaatcacccattttgttattgtttatagcaacctaatttggcacataataattcaggcagcattggatttgtattagactgaagtattaatttttaatataattgcattctttagtccaacaaaagctagttcagtagggattttactcatgtgagtcttccattattatacaaggcaaattcttccaagattttgcacctttctttgccctactgattcgtttctctataaattaaaaactcattataagcttaaactagcttatttgcttaaacaacacagtgaatgattacactggtacaaaatatacggcctatacatcttttaaacacctttttctttttcttttttttaattactatactttaagttctagggtacatgtgcataaagtgcaggtttgttacataggtatacatgtgccagttgctttgctgcacccagcaactcgtaatttacattaggtatttctcctaacactatccctcccccagccccccagcccccaacaggcctcggtgtgtgatgttcccctccctgtgtctatgtgttttcattgttcaactccacttatgagtgagaacacatggttaaaacacctttctctaaaggatatttgatttaataattaagcaaggcatgttttcctagcacaatgatatgtaattactaaaccccacaacttaacacaaaggttaataaagaaactcttgaaacatcaacaaaataatgataactaagagttgttccattatgcttcctgctaccacaaatctcaatgatgragatatttggagcaatacattaaaagattagttaacatgtcacccctcatgtgtgggtgatcacagagtacaatgtacatacttgagaagaaaaaaaggtgaattgattgaaaacaagaagatcaagggtaaaatataaaatatgttcacaaggtagtagggccttaatcactaattaccatccatattgttcatgcatatttatatatcttctacacgatggctaatatatattaataccatttaaaatactggttttatgaagaaaagcattttttaattttactttttttatttttttgaaaaagaatcttgctctgtcgcccaggctggaatgcaatggcatgattgcagctcctggcaccctccaccttccaggttcaagcaattctcacacctcagcctcccaagtagctggaattacaggtacctgcaaccacacctggctacatttgtatttttagtagagatggggttgcgccatgttggccaggctggtctcaaactcctgacctcaagcgatctgcccgccttgacttcctaaagtgctgggcttataggtgtgagccaccgtgcctagccagaaaaacatatttttgaaataaatatgttaaaactacacttttcagtacttatacttaagtactgaatgaccactaaatgaggaaataaaataattaattatagccatgcataactttggcaatttaatcattatgtgaagtgtacttacacaaacctagatggtatagcctaccacacatgtaggctataaggtatagcctattgctcctaggctacaaacctgtacaacatgtgactgtactgaatactgtaagcaactgtgacacaataagtatttgcatagctaaacatatctaacatgtctaaacatagaaaaggtaaagtaaaaatctggtataaacgatttaaaatggtaccctgtataaagtgtataagctccaagaatggagcttacaggcctggaagttgctctgggtcaatcagtgagtgagtggtgagtgaacctgaaggcctaggactttactgcactactgttgactttataaacactgtacatttaggctacacaaaatttattttaaattttttcttcaataataaattaggctgggcatggtggctcatgactgtaatcccaaaactttgggaagccaaggcaagaggatcactcgaggccaggaattttagaccagcctgggtaacatagcttaagtttaattttaattaaaaaatttattaaaattagccgagagtggtggcacatgcctgtagtcctagctactcaggatgctgaggcaggggatctcttgaggccaggagttcaaggatgyagtgggctataatgacactactacactgcagcctgggaggcaaagtgaccctgtccctaaaaaataattttaaaacaataataataataataaattaagcttaacttaccrcatatttttataacttttaaaatcttaaattttttgacttttgtaataacacagcttaaaacaagcacattatatagctgcagagaaatacttttctttaaacctttataagtcattttctattttaaaaaaatattttcttttttaaaaaatgttttaaatattttccttaaaaactaagacacaaacacacaaattagcctaggcctgcacagggtcaggatcatcaatatcactgtcttctacctccacatcttgtcccactggaaggtcttcaggggcaaaaacatgcatggagctgtcatctcctatcataacaaagccttcttctggaatacctactgaaggacctgcctaaggctgttttactattaacttttgttgttgtttaagtagaagaactacactctaaaatgattaaaagtatagcatagtaaatacataagccagtaacagttatttgttatcatgatcaaggattacgtaatgtacaaaattgtttgggctagacttttatacaactggcagcacagtaggtttgtttacaccagcatcgccacaaacacacgagtagtgcattgtgctacaatgctatgacagctatgacttcactaggcaataggaatatttcagctccattttaatcttacgggaccaccatcatacatgcagctcattgttaactgaaacatcattatgtggctcatgactgtatgtaaactgtaatttgaattctacaaaagtgggattaagstacattgtccccttggccagttcactacagagcagaatatggtacaaggtaattcatttttagacctaatcaagagagatgatgttaactaaaacaacaaagtagattcaaaattttgggatggcacctataaggtaatgtgaaggtctctacctatattttcatgacaatattcttatacacttcagaattctattttgcaaaacaatttaatcatactgggttgtggtactttagaaaatatgtaagaataagtcattttcatgtgaaatatgaggaagaaactttctctaaaggagtatacaatcgaaacaggtattaaaaattacagacataaaattatactataaatacgtgacaatagagaattttttattgtcttatcaagcttcccatttgtgaatttaataaaaacagaccagcttaaattaaatcagtagataaatgataattttaaaatggcaattcttactattcttgattacagcgtaaatacatgaggataaaaaaacatgatgtttgaaatgagggatatttggaatcaggaatgaaaattccaggaagccaagcactatgaatctcagtaaaaaagatgcccttctctagttaacacgtaattctcagtataatgtaacaagttcataggtcaagaaacttccattaacttctttaaattcatctatttaataacatgacaagcatttaattatggctaatttctccaccrcctttaagtataggataaagatgaacaagtctcctgaaagttctctcatcatagtttagctctctgaggtaaatgaacctcataatattccccgtatattcaccaacacctccccacaacatgatttccctccctgaccagagcccactgaaatactgacttagttgttgttctttgtgtatagtacaaatgaaattggtgaaaactaattaaggaattattcttctttgtcttgtatgaccaagtcagaaatattttttaaaaagctattaccagtctaaattccctttactctctgattcagggcttcattcattcagcacattgtgaagatctactatgaactaaattaccaatgtcttgaacagaactcaggaaggctggtgtctagtgaataagacatatactttctagaataagtataacataacatgtaaatgatatagcagacagaggtactggtttctacaggagaattcttaatccagactaaagaaaataaagtgaaacatcaggaaatcgttttaggctaaatcatcaaggagctagttattcagatgattcagataggccatttcaggcataaaaattcagaaacaaaatgcattaagaccttcgggggaaagacaaatatgtataagtgagaaagggactgcattgaggtcagaaaggtaagcaacgacttgggtgtcatgctaagaaatatgattttaccctgaaggttatggggatagactgaagaatataaagctggagagagagatatgaccagatttggcttttaaaaagatcatgttggaaacaatayaccagtagtctgttaggagatgacagtggaaatttaagtgagaaatgatgaggtcctcagccaaggtagtggtagtagggatgcaaaaacaagaattcaatcaataaatacacagtagaacctactatggctgggtatcattcaaggcactaagaataaaacagtaaacaaaaatctcatcccacaggaacttatattctaatggcacaaacaatctataaacaagataaataaataatataatagtatttcagatagggataagtataaaagagaaaaatgctggaaagaggaagaggatatatcagggagtgggattgaaatcttatacagagtagccagggagggttagtaaaggcctgaatgctagtaaaggcctgaatgaagtgaatgagccggctatgagaagatctaagtccagagcatttccataatagagaagagcaagtacagaagccctgcagcagtgctgtgcttgtatgagtgggagaaaagaaatgggagtgggggttgaagagaaggcagttgactatgtctacaccccttgtcctctggacttctaagtaaatacactaacagtatttatccaagaggcagaaacaatctctgaaatacccgtagcaagatgtccctagctaatgattcctatagtaaacagaacgcaagatttatgaggtwtatctccctagataatattttcaacagatagaactgtctagagtattaaatggagatgtttcataatttaaatattcctgctatgtgaagtaatcccatgaacatcatatggagacttcatctgctctgagccagagaatcctgtccaatgtggaaaggaccttggaagctgccctggatatcctggacctctctctcatttgtctaagctgttagaatgcctgtatctttgacattaattaatagagtttgatactgggcaagatctctaatgcatgtttatcagatttgacagtctgatcctgtatgtttgctcagagaggaagagcccagtgtggctgctatattgtgaatgggaggagaatcataaaaaaaatgatttcagaggcttaacgagtagtcagataatatagtcccctgtaagacactgtaaggcctttgacttctgctctgagagaggcgggaaaatattgaagggtttggagtagataagtgacatggtaattgttactggtatcttcaacaaatactataaggtgccaaggacagaaataaggagactagttaggaagctgtaataagtaggttaaagatgttggtggctgggagaggtaaagttagtgagaagtacctgtattctgcatatattctgaagaaagaaccaaaaggatttcccaacagattggatataaaatatgaaaacaacaaaagaaagaggactcaaggataacctcaagttttatgccctgagcatgtgcaaggataaaacagctatttgttgaaatgaggagaaccatgggaaacagcttaaataggaatgaggaggagttcttctttggatatactgggtttcaaatctaagtaaatatcgaaatgcwgatgagaaggggaccattggatatatgagtctggatatataggaaagaagtctgggatagacagataaatttgggagtcatcagcatatcaatggtatttttaaaccacaagcctggatgaaatcactagagagtcactgttactagggaagaggtccatgaactgatacctagggtgctctaattattagagatcagtaaaaggaagaggagtaagcaaagatgactgagtagcgactagggaaattagtgaaacactaggagcacatggctttactggaagccaggggaagaaagcatttcaaggaagaaagaatgatcatctgtgcctttttaacagtaaagaaaaacgaggattaaaatttgtccattggattttgcaacatgcaggttgctggtgaccttaataagagatatttaaaaggcaaaacacatccccattttagatatctaaaaataattcctaaggttctggctaggataaatgggtaggtgataggctgcagatggacttagtgagtacagttataatactccatactcagcttcaaagtatgaggaaaaacacccaattacatttctaactaatgaagtgttaacacttaaaatgaaatttaaacacattaacacagraaatcagggggaaaagtctcacatcatacagtttactatttttaacctgtctcttcttaaaatgagatcatgaacatcacctgacaagggcacgggcccatttacaaacaaaattttcttggattaaagggcctcctctgtttaagaggagagatccagatttaggtctataagcttgcccaacagtgtcaaatcctctgggtacagaagatatttccaaatcaracatttctgctggaaacagcagatgggaattttgttttattttatacatacccttttggcaaatatatctctgaaaaacttgccctgcagaaactaattgtctaagcaagattttctttttttttaggttttcgcccaacaggaatcaaatctgtgaatagagaatttaaggctggatagcagcactatttttgacttgattacaaagcagaaacagagaagaccaggcactgactggctagttgcagggaagattagacggtgagattggcatccagggaaaatgcacggccaactgggaggctgccccactaccttaatgccagggatactagatatggaaacagccaaccatttccagactctgttgaagaagcagttttctcatattggtaaatgtggctcagggtggataaagggctaaatctcccagaagtgaagttttggtacccacagttgtacagcatgatatgctgtagggcaggaaccaatgggaaaggacgctgatatactgaattccccctattaaattccaatcctttgttaccttcatctttacctgcatctttgttacctgcatcttgcaaataagcaagagttaactgtttaaagcaagcaagcaagcttgtttacagatcattgaaaacaattatcaacttgatgagcttcaaagagctgtgggataatttagtactaatctaaagagatagacaacatttctaaaatgttgcttattttagcagaaaacagtttaaggcagattccttcccacatggttcagctgacagccagctrcccacataaattcacgtgagtacattctctccaactgtctctgaacatagaataggctatattactaaaagcctttttctgttggaaatgtattctattaaacactttttctcctaagcctcagctgcactttcatgagcagtatattgaacccaaatcaaaatctctactttgtgttgagatctctgattctcaatggaatctgataaatatcaatttgatttaacaaaccattttggagcagtgataatttgtcaggagctgtactaatgaaaatatgctttagagaccaattcttatcatcaaggattgaaggatggggtgagcaaggacaaaggaatcagaaaaaaatttcatggaagggacattatttgagatggactgtgaaacatggctagggtttcaaagggtagaagaacattcctaaaagaaaacacaatgtgcaaagacccagaagggcagaagcactgagtctgcacaggcccaagaaaggtctgcttagaaattgctcaagatttcagagtagcagagtgagatgatccaggtttgattttttgaaaattagactaggggcaggataatgaaagctctaaaaatatgagaaagaaagagaaagaaaacaagcatttgtggtcaagaaaagaaggggtttctgtttttattcagggaaatttaaaggaaaatagatttttgtaggcattacaggattaaagtctacatgactgggttaatgactgattacccaagtcagtgaggccttccctaaccaatctatcctaaaatcacagcagcctgctctcacacatgggggcatgcctcttttagagttgatttttgaaatagcacttaccacaacctaacatactttaaacatgtttaaacatatattaaagcatattttacttacttagtttattgtctgtcttccttgaatataatgtaatatttatgagaacagtgactgctgtatctctacaaacataagtaataactaattcactaaatgcataaacacatgaatgaatataaaaatgactgaaatctaacactgtcattaaaagaaaccagggagccaggcacggtggctcacacctgtaatcccagcactttgagaggctgaggtgggtggatcacttgaggtcaggagttgaagaccagcctggccaacatggtgaaaccctgtccctattaaaaatacagtaattagccaggcatggtggcatatgcctgtaatcccagctactggggtggctgagacaggagaatcgcttgaacccaggagacagaggttgcagcgagccaagatcgcactattgcactccagccttggcaacagagcaagactatgtctcccaaaaaaaaaaaaaaaaaagggatctaggttctatctccagctctggcactaagaacatcagtttaggcaagttacttttcttccataaagtgcatttccctcatctataaaattgaggcctaactgaacttacatacacccactgtaaaattagactaagtccccagttaaatagctaagactacggcattttcctgccagacatgtgaaattgccacatttttgtcatgccactgccctcttatacacatagttaaaatcacttagccagaaagaacttatgatgcaatagacatgcttccatttaaaggaatgtttacaaacagcagctctcctatttcttgaatcaagctcagcatgagcaaggtcacagcctcattcagatgaagaaagcaaagtcaaggcccgggtgtctttgatcaatttctctaccctagctttcccatgatccagaaagtttgtttccccaaaggccgcccttaactgattcaataccatgttttctggatgattttgatcataagtttggtctgaggatcacaactacaaattcaattcttccatatgtccaaaattccctttagtgctaacgtgctatatttccataaatttttatagaaacttaccaagctgtggggttgataatctttctttcttcttaatacaaatgcatcatcagaatacgcatggtctcaaacataccttttytgaggcattaaaaaaacatagtgatttaggggaattttaggtaatttgaatgggtaataaaaaacaattgtaaagtcctttgaaaatgtaaaattactaagatttattcaatgtcattatttaaacataccctaatttgttattatttaacatttgtttcccagttggtcagttatggctgatgagctgcagggtgatgggaacttcatgccatctgtttcattgctaggagcgctagtctccccaggtcacttactgtgattataaacatggcctcaaaggaaacagtgactccatgccctaagaggccagaagctcagattttcttctcccaattctctcaccgatttactgggcaacttctaaggaggacattcttaaccttgaattatcttttgacccaatctttaatagacttaataggggtaatattttttttcttttttgagctttcagattatattaactttttttctatatactattctccaggggtaatattacttctcatccataaaggtgtttgctggattaattaaaatattattccaggatagaccacaaattgaaatgtggaacaatgatcattccttcatgtctatgagttcatgagtcattgtataaaaatagtgtcggttcattctctgtatcattacagagtatctttttcaaagaagaagtagtaaattctggcccattcatgcctgtatgctatctatttaagtatggtaattcaagacattttttaattggcactaattataaataataaccccagcttcacaaaacaaacagaggaagcagtcactgatacatttactttagaattagacaaaagtctctgtccccaattttctcactcatcaacacagcaccaccatgatgttttaaattctaccattagagatttatctctctatgtgttatatattattccccccaagacattctcttttaaaaagctgatatccctaaaaggagtaggatattaggatgcaaccaatcaataacattgtgtgaagtctcacagggtggaaggaactcaagagtattagatgttttgtggatagcagagatagaaaagggaggcaggagttgtcttaagacaaacttcacctagctcatggttttgcccaggaacaggcttcagctatgtggtggcagcaataggaaaacaatgccaaagaggtaaacttgctgggtttcaaaaattttgtttttgtcgtttatctaataaaaaaaaaaaaaaaaaaaaaggagccagaagcgaaaactacattcccagggtagagatatgagttaaacttcacatttctcttttttttttttttttttttttttgagaccaagtcttgctctgttgcccagactggaatgcagtggcatgaacggggctcactaaagcctcaacctcctgtgctcaaacaatcctcctcccaccagcctttccaatagctgggaccacaggcgagcaccaccatgcctggctaattttaatttttctattttatgtagaaatgcaacctcaccctgttgccctagctggtctaaaacccctgggctcaagcaatcctcctatctcagccttccaatacctgggattacaggtatgagccactgcacctggccaaacttcagatttctatacaaactattatcttttctggtccttggtaaattggaggcatctgcaaatattgtccattttttattacttctaaagtaggtggagcaaggtccagttactgcatagggcacaaaagtaaggacaatacagggagagagggctcaggctctgcctatgctacttctgcctacaactgccagtgtctgagatccatacttagtcatgagttgacagggcactggcagggcagagtttgtggcgataagaggcttcactgtaaaattttttatcaaaagcagcatctgctcatttaagaaacacttttatctgattcatttccttgtcccaacaaataccagtctttttcatattattatattgtctcatcatgctaagacactatataaataagcattaataaatgcaatccatatagaaagacattattcatatggaaagactgaacaaatgatagaatttttaagccaaatcaagtatatatcatcttgaaagacatgcaagtatgcaaataaatgtaaaataaagtggcaagtacaaaaattatatgtgtttgctatatactatggactctccagaaacagtgccacttttttcatcttataattaaaaaataaaaagacatattcactgacaagtattattaaacacactatgaatacagtattttcttctgtatgtatatgatgttaaatgcaagttttaattaatggtagtatgtattacagttttttttaaaaaaaaacaatgttcacatcatgaaagaagatgtaacaaattatgaaattatgttatcaaaatatggaattatgtgtttaaatccagttaagccccagtatcctatctaaaagaagacctatcaaatgcaaactcaccacacagaaatgctatcctaaagtatatcatcaaaatccactcagaaattttcctggagttgcaccatttttggctacctatacctgctctaaggagaagctcttatcatgttctgatttgagaatacctctttcaatattggctaactcttcttgtctttcaagattcagggcaggcatcactctttggtactgcatgttattatattaacctatacaaaccctattcctattgtaccatctttgtgtgtgtgcatgcatgtgtgtctgtgtgtgtgtgtgtgtgtgtgtgtgtgtgtgtgtgtgtatcctccccactgatttgaaaatcaccgattttcttttcctagtgcctacaatgtagctgccctaattaaatgggggaagagaaagctggcttgccttttatttaaaaaaataaaaaactatttcattcaaagaaaatgtgtcaagtgaatgtactgtagcacagattccattacttgaaagttatcattacctgtctcccattatgataaacttcagtagtgccttaaagaaaccttttcaactgatctgcttttcattttttaataatgttcagtattattcttgaacatagtgacagaatgcaatcctaggactgaagagtctaaatgtattctatttgtcatgagtattgtatttagtgacttgaattcttttttatgtagatgtagtccatcagttatcttatatatttatcagagttcactataaagaaaaaaatttctttaaaaatatgatgcagaagagaagaaactttatgctattatgtgagcaaattagctgtcaaaaccaactttaaaaggcttaccaaatagcatcctaccctttggaaagtagttgccaaggtaaagagtttaatcaaagtaatttctacatgatgcctatatttcaataatttatgaacggtacgtttgaactgaaaagacctccatctaataaaaacacaagtatttatttgtttttattttcttactcatagaattttttctttattcctctaggaatatataacaattggattttgtttatgccaactaacatggcatctctaaaatgagcacttatcttacatgaacaatttttcaaaatcttagtgtaaagtacagtctcaggaccacataactcccgctaagactattatatactccattaacatactgatatggtttggctgtgtccccacccaaatctcatcttgaactgtagttcccataatcaccacatgccatgggagggacccaatgggaggtaatttaatcatggggacagttaccctcatgctgttcttatgatagtgagtgagttctcatgagatctaatggttttataaggggyttttcccccttttgcttggcacttctccttcctgttgccatatgaggaaggacgtgtttgcttccctttccatcatgattgtaagtttcctgaggcctccccagccatgctgaacggtgaatcaattaaacctcttcctttataatttacccagtcttgggcagtcctttatagtactgtgagaatggattaatatacacacccaatggaagaatggacaaaagctgaataacataaaattcatcacaaattaagactgcttttggagtaaaataatgtaaattacacttatgccctcatgctgtatttcactgctttggccagtggttctcaagcttcagtgtacatcagaaccacagggaaggcttattaacacagattgttgggcctcacattcagagtttctgatatagagtaggtcaaggttggggcctaagtaagtccatgtctaaattccaaacatccaagtgatgctgatgttgctggtcacgggaccacattttgacaatcagtggcccaggtaactacatccacacagatgcctgccatgactccaaatccacctctcaggatcaggcttatctatccaattgaccatctggatatcttggagagtccctaagtacaaatgccctacattacctaaaacctatctcagaaaaaaatgacaccaccatgaagcaagttgctcaagttgttcaagcttagaagtcattcttaactactttctctctctggtcacattctattcctacacatgtttccaacctgtctacttcatctctattaccacactaatctaaaccagagtcatctcatgcttggaccacagcaacagcctcctaatcagataaatacaaacactccatttctactttttccccacccgatctgttttctgtaatgcagacagaataactgttataaaacataaacatgatgacattaaaattctccaatgacttcttatatcttttagacaaagtctaaaatccttaatgtggcttcccataacctccaagataaagcccttactmtatctcttcaggattatcttgtgtaaactctcccacctaactatgctggccttcaaccacttctcattttatcctccctcagggcttttgctcatgctaatgtctataaacagtctccaccttgcttttttagcaaactcctcatttcttggatctcagcttaaatggcatgtctaatacaaacctttcctgattccccaaaataaataaatcactaytatattctcaaaaggcactgtacactgctactttagtatgattaaacacactgaaaattacttggtcatactacaactatttacctcactagctaagctccacaaggaaccattctgtcttgttcaacattttaatctcaaggcctgtacagtgcttcacacatagtaagtgtcccaaactaggcactgattggctgatacatagactattataaaaatttttatgtgttaatagagaagaggagcaaacaaaagtagaaaagagctgaccaagttcacagaaatgtccagccatgggcttattcccacaggacatccccaaccttttcaattgggctcacctagcccttttctttgggcccacacacctcagactctaggaccaaaattggcaattggcagaaagatagagatttcaaagtcagcttttcatttacccagtaagatcacctcagattataatacagaagtacatagcaagagtacagaaattagctaactgatctagatgttggaggaggtgacaatggagtcttgatagagtataaagaacattacaaatggaagaaacacctagatcaaagtccagaaattaaaaatagctcagcatcctgtaatctcagcactttggaaggtggaggcgggcaaaccacttgaggtcaggagttcaagaccagcctggccaacatggtgaaaccccatctctactaaaatacaaaaattcrctgggcatggtggcgggcatctgtaatcccagctacttgggaggctgaggcaggggaatcgcttgtacccaggaggcggaggttgcagtgagccgagatcatgccaatgcattccagcctgggcatcagaataagactccatctcaaaaaaaaaatatatacatacctcagcaatgccgaaacattactggaacactgaggtataaagcccaaagcagtggaaattttgggctgcacgagaaagacagggatcagatcatgggtagccttatttgacataataaggaggttaccatgagctcatagcctaacaggaaaaatatggaaaactagacatcatacataataataaactctaaaataaaggaagtggccggatatagaacaacagttatcctgccatgggtatggggtcatcatgaacaaagcatayaaacttctaccttgaggatgcagggaggtgcacgtgcaatattgtgagattcagagataggggacattcattccacctgatgaaggaacacttcccgagggagcaaggtctgaaggggtcttaagttctggatatacagaggttacggttaggaacattcaaggctcaagcaaaatcatagccaaaaccacaaatattacatggaatatttctggaattaataattatgtttggctggagcatagtggcataaagggaaggaatgaaaaggatataaataaaagtaggtttgatcttaatactgagaggatgcaaataccaaagtcatcagtttgatttataacaaactccattttttattaagaactatatatacttcttaaattttatggaaactaataacttgcctacagtttcttcagtcaacatataattttcaaagtctttcatgggaagaaaatgtgcttccctaacctattctttatttactctgccaatgacacccaaaattattacttccatctgggttttaattacacctgtttttcccagggggaaaaaatcaatgtaaatccaaataaaatatagtagatagttctaaaatgtaattagtgataataatcaagcaattcctacaggaaaaatttacaagtctctgatctggtaggatcaccttttcaaaatgggaagtcatcattacataatatgaaacattaaaacttccattaaaaggaaggctaaaatgagtcttaaataagatgcactcatattaagaatctttttacagtaactgaagagaatcttaattattttactttacttgagcctctctaaaaaccttattgccagtaatttgggctgacgaatgtagtcaatacagaagagcctcaattttaacacttctccctcaaagcctgtccctcttgtggttttctgataggctattgttagattcatttacagtaaaataattaccagctccctaagcaagacacatagcaggttatctattgtcccttagaggactgttggactgttcttaacaagcatactaaattacaatagcagctttattgcaattaacaaacagacatgaatcaccaatccagttatatctcaaaagagagaagggttttctgaagtatactgctgtggttgttttctgaacaactgttttgtaatcctaaattcaaagacccgtatttaagcaaacaggcacatgtcccaggagcaggcaacacagatagaatagtttttcttgttattcccaacagaaagagtaatagtataatgatttagagaattaacagagtgcagacatgaaaagataccagcattccccatcagtacgtaaagcactcacgcttgatcatttacagctctgtctgcttgacatcttccagtctctgatcccaaagcagtagcaccaaggcgcaactctgcttcttcatttacattgacattctaatctcgagatgtgtcagaattaaagttggcaagtttccagactatttgaattctttcatgttgagaaaaatgcaattgcactgtgcatattcataggaatcccatggaggctcccagaggatctgctcacagagacaaggaatacaggtcagtgcctgtaagtcaatgagaccacattgcccactcataagaggtggagggacgctaatgagataagagacttggcccaaatgcttctctacaaataacagyaaagcactctcacacaaacatttctaccaacaaactcaaatatttccgaggagaattagcttgttaaaaagaaagtttatgttctgaattgaattcctaatggttttgaaccagaattactgttcccccaactagcatttctatacttgggctacttcctacaagtaattcacactccaaaaacagttgtgggggactggtgaaggaaagacagtaattatactgaaaatgtaataatacaaaattcacttctaacaaatcagatacaacttattcagtgtgggaggtgtgcatgagttattcacaaggtaacacaattaagttttaacatacaattttatagggattgcactgaatcggtagatttaatgataatgattcttccaatctgtgagaatggaatgtttttccgtttgtttgtgttatctatgatttctttcatcagtgttttgtagttctacatatagagatctttcacttccttgattaaatatattcctaggcattttttaatagctattgtaaatgggattgtcttcttgacttggtcctcagctagattgttattggtataaagaaatgctgctgattcctgtatattaattttgtatcctgaaactttactgaatccattgatcaattctaagagttgttcagtggagtctgccgggttttctaggtataagatcatatcatcagcaaacagggataatttgacttcctcatttccaatttagatgcctcttatttcttaatactttcaacttttccccattaagtataatgtcagctgtgggtttgtcttatattttctttattatgttgagatatgtccttctaaggcctagtcttttgaggatatttatcatgaaggggtgctgaattttactgaaggaaatttttgcatctattgagacgatcatatggtttttgtccttaattctgtgtctgtaatgtatcagatttaccaatttacatatatcgaagcatccttgcatccttgagataaatcccacatgatcatggtatattaatctctttgatgtgctgttgtgttctatttgctagtattttgttgaggattttgtgtctatggtcatcagagattttggtctgcagttttcttttattgttgtctccttatctggctttgggatgaggttgatgctggcctcatagagtaagttaggaagaattccctccccctcaattttctggaatagttccaagaggattggtattagttcttctttattatttggtagaattcagctgtgatcccatctgatcctgggcttttaccaatgtcatttttcacagaattagaaaaaaaaaatcctaatattcatgtggaaccraaaaaaaaaaaaaaagccaaagtaatcctaaggggaaaaaaagctagctgcatcacactacctgacttcaaattatattacaaggctatagcaaccaacagagtatgggactgatattaaaatagataccaagatgaatggaacagaatagagaacccagaaatgaagccacatacctacaaccagctgattttcaacaaagtcaacaaaaatatacactggggaaaatgccaccttatttaataaatggtgctggaaaaaatgaatagccacatgcagaagaatgactggacccatacctcctttcaccatccacaaaaattaagatggattaaacacctaaatgtaagatctgaaactatgaaaatcctagaagaaaacttgggaaaaactcttccggacattggcctaggcaaatactttatraccaagttctcaaaagcaaaagcgacaaaactaaaaatagacaaataggatttaattaaactaaaaagcttctgcacaacaaaaggaacaatcaacagagtaaacagacagtctatagaatgggaaaaaatatttgcatttgacaaagggctaatatccagaacctacaacgaactcaaacaactctacaagataaaaaaaaaattaaaaagtgagcaaaggaatgaacattttccaaaagacgtacaagcagccaacaaacacacacaaaaaaatgctcaaaatcactaatcatcagagaaatgcaaattaaacccacaatgagataccattttacaccagtcagaatgactattaaaaagtctaaaaacactgtaattctggctattcaggtggctgaggcacaagaactgtttgaacccaagaggcggaggttgcagtgagccgagattactccaccacactccagcctgagacagacagggaccttgtctcatttaaaaaaaaaaaaaaaaagtctgaaaacaacagatgttggcaaagatgcagcagaaaagggaaygcttgtaggaatttcagtacaacctttatggaaaacagaatggagattactcaaagaactaaaaatagaactactattccatccagcaatcccactactgggtatctacccaaagagaaagaaatcattatataaaaatggtaactgtaatttgtgtgtttattgcagcactattcacaatagcaaagctatggaatcgacctaagtgcccatcagcagaagactggataaagaaaatgtagtatatgtaacactacattatgctattcagccataaaaaagaataaaatcatgtcttttgcagaaacatgggtggaactgaaggccattatccttagtgaaataacttagaaagtcaaataccacatgttctcacttataagtgggagctaaacaatgggtacatatggaccgtggagtaaaagacactgaagactatgaaaggtgagaggatgggagaggggtgagggctaaaaagccacctgttgagtacaatactcaatatttgggtgatgggtacactgaaagcccagacttcaccactacacaacacatacatgtaaaaaacttgcayttgtatccccaaatatacaaacaaataatttctttgaaaagttttaacatacacatttacagtgcttctcaacaatttctgccctatggtatatagagaaaattatactctttatatgagacatgagtaaacatggtttgtatgtgcagctggagtgaactagcctgggggctccagccactctcaaactcttcatctcttctccactcccaacaattgtttttgtaaaatgacacacttttattgycaaaaaaacacagtcagatcagatagttttaaaaatgaatgtcaccatttagagataaccattgtcaatgcttcactaaaacatcattccagtttctctctacacatatacagacacatcagttgcacaccccagttgtgaaactcagtaataaggcatgatttacacatatttgtattaacgctccaactgaagactttttcatctttaagccctgaaagtgagaaaggaaaacctaataaagtatgatcttttgttaataacatgttttataattttctagctcatatatattgttcttgctctaccttccccacatacacaagtaatctagttttctgtgatcaaaactatttccttgaaatctacacccaacttgtacccagaaattagatttaaaactctacctctaatccaacttttaagatatcttgttcttaacagaattagaaatattcattttaatggtttctaagtcatcagttctatgagaatgaaatattttcccaatccttaagacatgaaacatgaaaaaaaaaatttcaaccacccaaataatccataaaaatcaattaacctaagtagtctattgagagcaggtcctctgtgcagttttgataatcacagacattgaaaaacattattgtatttgattttactttttatctcccaataacaaatcttatacagcagaggctattttatggaagtgataaggtttacgccagattttcaaaattgggtaaaatgtataaaacagaagaataaaagcaaagttggaactaatgtggtcttagcctgattcaaaaagctcactgtaatgggttgaatagtgaacccccaaaatgatatgccgaagtgccaacttccagaaactgtaaatatgaccttatttggaaaaagcttttttgtaattaacttaggatcttgagataagagtactgtgaattaagatgggccctaatccaaagacaagtccgttgaagagaaggagaaacaaacagaaagacagagaagaccatgtgaagactgaggcagcaactaaaaagctatttctactagccaaaggatgccatcttgagatcctaagtgaattacgaaaaccctttttctaaatattattgtctcaattttacagttttgtcatctatgaaactaaggcaagatttctctgacttgatatcacataggaagggacaaagcaaagatctgaactcaggaagtcgggtgcaaaaacatgtgcttttaattactatattataacctcttttgcttgaagaacaaagtggaccttggggtgtaaaggaaaataaacagacatataaagaggccaggttacagagacttcaaaatacaaaggattttgtccatgatgcagcatatagagaacaaacatttcgggcttttaatgcattgcccagttcattgcattgactccatctccaacctctatcttgacctatccagttttctccatctttaatgctgactaacccactagtgtcaaccttcttagtagtctcctacttctactcttgcctattcaaactattctccacaaataagccaggatttatctatcttttaaaaacaagtcaactcactcctcttaacaccatcaatgacttcacaggactcttgaaacaaaataaaactccttgccatactctagsaaggccctaaatgatctggctttcccttcgacatcrtctcattattctcatccatcattatgttttagctgtcacagcctcctttctgttttacaagcatgccaagctcttccctattcccrggacgtcacatttgttgttccctctgcatgaagtccttttttcccagttcctgcatggctcattcacatccttcaggtctcagctcacataacatctcctcagatgtcttcactcttcacctacctaaggtggtctcttaagttatcccaagattgtatttattactaccaaagcccttatcacagtgtgagaatatcctttatatacttgtttactgcctatcacaacacagaacagaaggcccaaggaggcagaaactttgtccagcttgttcaccacagaaccactgtacctaaaacagtggttggtacacatcaaacattttagaaaacattagtggcaagcaaaaaaaggaaatgtcatgatgaactggtcttccgagaaacttggtctaggaagtaacgtacaggatgacttcccaaaagcacagactaaagaaacagacaaattaggcgcctcttactaaaaacttagtaataagtgtttaaaggcttggataagaactgattgagtaagaacaacaaagaaaggagtgaaattggccgggtgcggtggctcaggcctgtaatcccaggactttgggaggccgaggcaggcagatcacgaggtcaggagatcgagaccatcctgtctaacacggtgaaaccctgtctctactaaaaatacaaaaaaattagccaggcgtggtggcaggcgcctgtagtcccagctacttgggaggctgaggtaggagaatggcgtgaacccagtaggcagagcttgctgtgagtggagatcacgccactgcactccagcctgggcaacagagcgagactctgagaaaagaaagaaagaaggaaagagagagaaagagagaaagagagaaagagagaaagagagaaagagagaaagacagaaagacagaaagacagaaagaaagaaagaaagaaagaaagaaagaaagaaagaaagaaagaaagaaagaaagagaaagaaagaaagaaagaaagaaagaagagagagaragaaagagagagagaaagaaagagaaggaaagaaagaaggaaggaaggaaggaaagaaagaaagacagaaagaaaggactgaaatttagaaacttgcagaagataaaggcaataaaatttagtaaccccttaaatacataggatacagagactaaaaaatgtggcaagtcaagaaactgtcacaaacctcacagcttaggttacatggaagacttccatagcatttgaagtctatactttatatacttcataatttaacctttattttatccaacaggaccaaacactaagtacccaacagagacacttgggaggcatagtaaacttcacagaggtgccatcacccaagctgacccaaaaaataaccagttatttttgtcaaaactaagaagacattaaattattacatccaygtttatcagaaaatgtaccaacattctgtacaccagcattatataaatgggggtactctgttataagtcaaggataggaaatgacatcaagtggcaccaaaaacaaacaaatttgatttcatacagtraagagacagatcagtcagagcagtaaacagctcttctctaaaggtgacagggtactggaaagagaccacaggaatggtaggacaactaaggttgtttttatagaaatcatgaaatgttgttaagctatagcaataaatgtakcataattgttgctaagttatttagtattattttctttttttaaaatacattcaagtgtaccatgaaaaatttcagtattcaaagctgtgtccaaaagagaaaataattgggaattgctgaccttcaatatttcaagcattgtgctaggtagtggacaaataaacattaataaaacatagcctcataaagcttataagactaattggctatgatggaaaacaagcacacacataaaaaaattatagaaagaagcgtgacagatcaacttctggcatgacagtatgaggatctccactgttctggtctcccgtgaaactggttaaacaaattttttaaggcaaatgatcttcagagcagacagcaaatgaagaaatatctgttcttacaaaaatggaaattcggtaagaaagggaagagtatggtatttgaaccaagactgctcccttactccccattcccagttcagaaataaagagggaacttttgtaatgataaaagagccaatcaatcaggaagttatagaaatgataaacrtatatgcagccaataatgatgcacttaaatatttgaaataaaaactgacagaaatgaagggagaaacagatgattcaacaataatagttggaaatttaaataactctttttttgattttttttttctttttaagacagggtctctctgtcacctaggctagagatcagtggtacaatctcagctcactgaagcctcaacctcccaggctcaggcaatcctcccacctcaacctcccaagtagctgggaccacaggcgtgagccacaatgctaagctaatttttgtgtgttttatagagactgggtttcaccatgttggccaggctggtctcaaattcttgggctaatatgattcaccccctcggcctccctaagtgctgggattataggcatgagacaccatggcctggccaataactcactttcaacattgcatagaaccactaactagacagaagatcaacaaggaaacaggagacttgaacaatactataaacaactaatctaacagacatcagtagaatactccatccacaacacctgaatatacattattttcaagcacatgtggaacactgctccaggacagatcatattctaggccataaaaaaacctcaatgaattaaaaggataaaaataatatatgttctctgatcacaatagaataaaattagacatcaataacaggaaaaatgtggaaaaatcataaataggtagaaattaacctactcctatgtaaccaatgggtcaaagaagaaatcaaaaggggaatcagaagaaaaacaattacagaacattgtggtaaatgcaagaatgggagctagcaaggagctaaatgtgcatatagagttgacactaattctacctaggaaaatgcaagaaagaagaaaactacagaacagaggaagtaacatttaggcaggtcttgaaagatgaatatgaatttatgtggcaaagacagggagaaagaaaatgaaaaacatggaagcagcttcccaaagcagggaggtgttgaagtgaatgataaaatctgaaatgatgagcagttaggagtggctagcatgtagggtatgtggtaggagaatggcagtcgaggaagacgagctggaaaaagaggttagggccagattgttaataaacaagaacactactccaaggggcctgggctttactttgggtaacaagacatcattaaagttgtaaaaagagacatgattggccrggcgcggtggctcacgcctgtaatcccagcactttgggaggccgaggcgggcggatcacgaggtcaggagatcgagaccatcccggctaaaacggtgaaaccccgtctctactaaaaatacaaaaaattagccgggcgtagtggcgggcgcctgtagtcccagctacttgggaggctgaggcaggagaatggcgtgaacccgggaggcggagcttgcagtgagccgagatcccgccactgcactccagcctgggcgacagagcgagactccgtctcaaaaaaaaaaaaaaaaaaaaaaagagacatgatcagatttgcatttcatatcatattctatgtcacagtactcatgtatattaccattttctcctcagtatatataacaaaagtttttcaagacaggtaaaataccctgtagttctcatggctctgccacagttacgggctcaatgctgggaacactgcagccatctaaaaaaaacagttactttttcactgcactaatagtacaaaacttctagatatattttgctcataaactgaagaactgttcttttgtttgcaaattcagttagccttgctgactattcaatataactgaaaaaaatcataacttgtgtttccatagcttttaatgtcactgaaagaagccttaacatcctcttctccttcattactacattactacagccacccattgtggcagttagacaaacgaagccagcatttggagagagggagtaggastgagaaattggccaagaaaaaaaaaatgtatttagttcatggaaaggaaacttgaagggaaatccatgattcttagaagtggaagagtttagggaggaatgtttgggaaaaccgtagtgctgacaatgactttgcttaagggtagcaagagtgaagaggaaagacaggtcagtagagttcagaatgactataagcccggggctttaaaaatttcacaaataagaaaggttgcaggcactgagagcaaaaagaaaactggatgaagtgttgccatagaggaaagaaatccagagtgaaatctctagctcagctatgacaatgtactctgtgagcaatgaaagttcaaggggtttttggaatactacaaaactatccatctttatggtggacaaaaagttgcaaatacaggaaaacacactcactctaccaggcattggagaaagtagaacaaaatgcagatctggccacctaggagctcaaatctaatgaaaagggagaaatgcaaattaatatgtgccatcagtgaaacaaggactgatgaggctgtttgtctacagccatgagccacagggtggagtgactgtgctgagggtaaggaagagcttctcagatgaatgagaggatcatggagaatggaaaggagtttgcaccgacagcatcacataataaaggccttgcaaagagaggatatagcttaccctatgacatgaaacagtgtggcatatgaggaggaaatgaaggaacacaaggcaggaaaggccatcaggatgcaattacagagggcttttagtacaatgtaacagcctaacaaacgacctcaaaatcgtatgatcatctaagcaggacaccctgtgaggaaaacaaaaacaaaaataatcagaaatcatcatttacaaaataattagcaatgtttccttgggaaagacctgattgaacagagaaaagcctttaaaatgatcagaaaatgaagggaagaggcaacactaaagttttcaagtttggactgaagtctatgaaatcatgatatcattaagggcgtattctctaaatttcagaacactagcttaaaggggaatcattgaaacttaagggagaaaaaaagcaattcagaatcatacaagaattacataaatgctcatgcaattcaattttcagtgctaagaacagacttccccaaagcagtattcccctggtcaaatcctctagaccctcaccaatcagaattcatttctccctcctcaagacttccacagcatatgayagcacttaacacagtctttcttgtgtctctccaactgtaartcaatttcctgaggctagagaccacacttaattcatatttgtatacccaacagtatctagattcaataaatgcatatttatgtactgcaaaatattcacagggatactattaaatacaaagtaatgtgcttaatacttctgcatgataaagaatgagagacaacaataaccctgaaagtcctcatatctggtaggggggttatgtatgaaaaccagtcactataatccaaaaccaaggaagaaggttcaatcaaagcttacacttgtaggttgttatgttgtttttcattcattacctacaggattccaaaaggatttttgatagcttacagaagtacatacagtataacactaaaaagactaattattgagaaggcacacataaagaaaaaataataagagaagaagatggagtcaggacagttcacgaaaagtttaacagaagtacagttagagatgcacttggcatcaaaaccaacagttagaagattctcagcaacagttgctcaggagaagtttagctattcctgacactgggacaggacagttaagaactttctcctatggttgttcataagacaaagactatgtaatatatggaccatctccttaagcattccaccacgatcaacgcaataatgacttaactgagattgcgtattaatgaccctcaatctgtcaatgattacaccacactaccactcagtaaaagcaattctcaaagggccaaaactctacgatgatgtggcttgaattaaaagaaaaggtctactccctagcagaatgaacggattacatattcctcagaaatattatgcaaatattatcatagagaccgttttgataaggacaaagtggcatagagtttgagattgtggtctccgagaaaaaacaggaatataaatattctctgttgtcaattaarggcatattgaacttagagaattagcagattaacaaccaggtttgcattacttcatgaaaacaaaacagcagcatgtggagagtaccccactcctaagcaaaggaaggccatgatttctctcagaaaatggtcatggatcctctttaacacacccatcagtgggtgactgaggtcccagagatgtagagcctagtcagaatgatttagggatacacactttccaaggcaggcattcccaatcaccatgctgtaaaagaaaacatttgataagacacccttagaataattcaaattaggcaatgtttcaagataaactggctgcaaaatgtgctctccctagagaagtgagatgacttgctccatggggttgttactatgaaccataaaatatcagaggatctctgcaattgattttagagaaggtgctatgaaaccattcttacagccaataattagatatcagaaacaatgttctttaaagcccacctcaatcctgtctgtggtaataaattaatgataccagcataagaaacaaccttacttttctctacatgggaagaaaaataagaaggagcatatatcctgctcacttaagtgtgccaagccattacgatacaaaatgaatctctaaacgtacatattcctgctttacctgctcagaagtatttactaagcaatcaggaaaacatctgcaaaccctgattttgactgtggtattaagcatcataactgctacgtaaagccaccataaaggcttttgtattaaacaccataactgatttgtaaaggcaccatggatggagggcaaaggatggcactaatatcatggatacagatgtaacttacagtcttttgttccacaaaatcaagaatccacaccaaaaaaaaaaataaacaaacaaaatatactttaaattggcaatatttttctcaaggtattgagtatgaaaatggctacgtcggcttgctagttttgttcaaagttgttatgaaattaaaaactgccatacattctgattcgggcccagagttggagggaattgatgattatccaataaaaaatgtatataagtctaattacagagaactagaaatgtaaagccaaaaagacagccctttgaaatagccctcaagcagtttcacagacaggagaacttccacggactcccttctgcatgatggatagttggaccaacagaaagaaatattggagtctataaagtttgcagcatttaatcttgcttcataaagctggaaaatataatctatccaaattccaatcaaagagaatctgggtttccataagctcaataatgaaatgccttgcataggtaaacatcaaaaattaccaacattacatttctaagagtcacatgacgattctcttgtaatttattacagattttttttggctggttttcgttcttactgttgtttccaatgcactaagatatatgttaaacaatgtgctatgagagtttcaaagacagcagagatcacattcaattgtagatatgcagccataagcaggaataaagatgtggtcaaagggaagagatattctatgaaagaaattcgtatttggtggatttaggttatttgttaataaaattaactcaagatggattaaagacttaaacctaagacctaaaaccataaaaaccctagaagaaaatctaggcaatgccattcaggacacaggaatgggaaaagacttcatgactaaaacaccaaaagcaatggcaacaaaagccaaaactggcaaatgggatctgattaaactaaagagcttctgcacagaaaaagaatgaacaggcaacctacagaatgggagaaaawttttgcaatctatccatctgacaaagggctaatatccagaatctacaaagaacttaaacaaatttaccagaaaaaacaaccccatcaaaaagtgggcgaagggtatgaacagacacttctcaaaagaagacatttatgcagccaacaaacatgaaaaaaagttcatcatcactggtcgttagagaaatgaaaatgaaaaccacaatgagatagcatctcactccagttagaatggcaatcaataaaaagtcaggaaacaacagatgctggagaggatgtggagaaataggaacgcttttacactgttggtgggagtgtaaattagttcaactattgtggaacacagtgtggcgactcctcaaagatgtagaaccagaaayaccatttgacccagccatcccattactaggcatatacccaaaagattgtaaatcattctactagaaagacacaggcacacatatgtttattgcggcactgttgacaatagcaaagacttggaaccaacccaaatgcccatcaatgatagactggataaagaaaatgtggcacatatrcaccatgaaatactatgcagccataaaaaaggatgagttcgtgtcctttgcagggacatggatgacactggaaaccatcattctcagcaaactaacacaasaacagaaaaccaaacaccacatgttctcactcataagtgggagctgatcaatgagaacacatggacacaggaaggggaacatcacacatgggggcttgtcagggggttggggggctagggaagggacagcattaggataaatacctaatgtagatgatgggttgatgtgtgcaacaaaccaccatggtatgtgtacacctaggtaacaaacctgcacattctgcatatgtaccccagaacttaaagtataattaaaaaaaaaaaaagcctggaaagacaagttggtggcaaattctgaatgatcttgaatgctatggtaagatttagtgcttaatttgtaaggtaatcgttatcatgatgaactgaacctggacctgaaattataatgagcaaattatctcaagttattctttctgtcgcttcaaagggwtatataaatcaaaaggccaattctgaaaattttaggaaagagatccaagctattttgtagacccagaaataaactttatacctactgttctattttgttttgttttgttttgttttttaagatggagtctcactctgccacccaggctggagtgcagtggcgcgatctcggctctgcctccccagctcaaacttttctccagcctcagtatacctactgttcttatgcttggttgttgtgttttaagccttctgtgacctcacggaaattttgatgttgacacagctccaggttttacataaatttaaaggccatttgaattggaatttgattaatgaacataaaacctagtagtgaagttaacactctcttaacatccccaccacaaaagcaaagccttgaattgagtctcactctattcaaatcactcacattcttattgcaaatttcaaacctacttattatctggtagtgtcttctccccagtctgccactgcacatagaaaagaaggacatagtttaattgcttcccatgctcacagcagtaagtccacatcattcttaattttgttttataagagtttttcttcaaatacaaacatcatgctattgatccaccattaggtatcatgtgcattaagtggatttcctgggagtggggctgttgaatcctttcatactccattgcctatcaccctttacaaaaatccctcactgtgcaacacataatatgaggaataagaaaaattaggagaaatattctaaatatatagaagaaggtaaatagactgcctatatacttggtaaattctgatcatatttgtatattcgttggaatgttttaaatgccttcagatgtaattttaaaatataatctgtgtttatttaagcatgattgacttctttttaaaaaaaaaaaaaatgaatgatttaaatcctacagaccctacttatgtcagaggtcagcaaccttgtagaagtagtgtgtgccaagctgccagttcctatttctgtcaagcaagggagaaaagaagcagaagcccaaaataggcaactgagaaatatctgtgatacacagatatgtgaggcctttctgatgaatctattgcaaattgaacttttgaccctgtataaatcccctttttgtgcttcatgttttctgattgcacttatcactatttaatactctgtctctctttctctctctctctcactatatatatatatacaaacacacacacacacacacacacacacacacatatatatatatctaattttctatccacctcccaactagaatgcaagctccaaaacagtagagatttttgtctgctttatattcactatacctagaataatgcctggcacctagcaggatttctgtaaatatttgtgggaggaaagaaggaagtgtgttcaaataaagatcctatagaagttcttcatgtgcatttcataccttactatgtgactttaattagaaaccactccctcccttaaaatccaaatgaggccagctgcttaagaaatggatatcatttctagataaaaagaggcagtggaaagacacagatagtatcttgcaatttggggtgattcaatcagaaaagatcttttgagggaaaaaaaaagttcaacaagaaacaccaagaagcctttgcagaagaccagtggttgcagcagcagctcccatcatctaaatgtcttctttttcaaagggcagggccctcctgggcgatggcccacaaacatctcacagagtccctaaggagttctaccaaactgaatgagtctcctaattacaacattaaaatacctaycatccagtcttacttttgacagatgtccttgtacttttacagagcttagagtgaaagcatctaaaaaaatgtttacctttaacctggtataaggagtaatgtaccttttttcttccttcagtttaaaatccattccaccaaaacctggccgtctacacacaaaatataatgatggttatcaggggccacaggaaaaggatgagaaaaatggtgattaaagggtacaaaatttcagttagagggaataagccttagtgatctgatgcaaaatggtgactataataaataataatgcattgcatatttcaaaattactaaaaaggtagatttcaaatgttttcaccacaaaaaaatgacaagtatattagaggaaggatttgttaattaacagatttaatcattccacattgtaaacatgtatcaaaacataatattgtacccataaatatgtacagttatctgtccattgaaaataaaactaaaacaaaacaaaaaggctttgctaaaggaatctccacaagcttccaaggatatttgaaaagttctacctaaatcactactgtggtgatttaagctctttcttgcctgtccccctgcagtgaagaaagaacagctgctcatcatcactcatataatatctcttcacacacagtgaaaccaagaaaacaaccatattcaaaaatgcctgtcaaaagacaatcgtcctgggaaccactcatggcctctgtgtctatgatttcactgaacttgaagactgtaattaagtccctattcagacttcacttctctaggctaaataaacccaatcctttagactttcatcacatagcagatttctcaaaccttttaataatttctgttggattcctctggattctctccaaattctacataataaaatcatgaccagggcttcaggagaaaaagggaattgcctggcagcctcttaatgttatcctcttacatttgtacagtttgtttttcctccctatgtgaattaccctgcacacatttctacagagctatattcagtagatgtaaatgtactcagtttacatgtactagttcttccaacttgccatgattttttttttgaagtgtaatcctctttttgttttccagagtactggcatcctagcctggttcaaagaaattgacatattatgtgtcactaatgaaaaggaaaaacatcaggctaaagactgtcatctagagagtattattcagaatctacttccacaaacttcccagggtgggccaggtrggtttagatttcaactctgccatttactagtttcaggactgtggcaaatattgaacattttttggagaataataatgcctacttccyagggttatcatgaaaaatgaattgagttaataatggaaagaatatggcagagtgatacgtgctctgcataatactatatatattcattattttatcttctttatggaacaaccattataaccactttgaactactttcacagcacaatggtaaaggccaagagagctcattcctctatagaatgaaactcaatatgaaggatgaaaggctggtcaaaataataagtcaaaagacttaactcttagcatatacctcaccatcctgcttttcagtcagagcagcagcaaggacatgagatataagcaatggtgtacacctaagaagtgcagggaaactcaaaaaatgataacccagtatgagcaaaataaacttagaaaccaaacccctgaattcggctctttccccagtgtattgattgagcattagaccaaaagactgatcaggtataaatttagtattttattttagaaaagaatagcttactgctccaaagataatcaaaatattaatccttttcactttttgtgagagcaatttttgattctaatgtttttaaaaggcatataggtttcaatataaagaagctacatattatttcaaatgaaaaacaagatgaaaatcctaagtagaacagggcaaaaaattaataatgtatttttttcaacgactttcctgacatttgacctcttggtggggagtctacgcagctagcaaaccaaatacgtacctccttcacaaaactactataaaaatataactactgtttgacaaagcacttacggatatgcttcaaaattgctgattgacaaggatataatattatctgtagttttaaaatatttttaacaatgtggttcaaaaaactttccatgtattagattctatgtaatgtaatcttagcagagagaagtcacattcacaacgtgaataaataagaggagagctaacatgcaatttcttccatacaccaggtgctctgctaaacaccttatacaccttatctcatttaatcctcagaacactttaccacaagtgaatggggaaattgaagcttagagaaggtaaataactgttcagtgtaacaaattaagaatgatactcaggaatacataaatcaagatatagatttcaacccaaccctattctgatcatgcaatcaagttagtaggtcatcactagcatttattttaataggatattaatagaacagagaaagaccataaatagtaaaacagaataaacttctttgaaagtcactgctctaaaccactgctatattagaagcaactaaacatcaaagaaacattaatcttaaaagcattcaagaatattcagagatcatttacccttaccatttcactttacagatgaagaaacttaaagtttgggttattttctttacccatagtcatatggctagttggtggcaaaatcagaacaagagcccagggctaacaaaagtatattgatttgagagatgtattataaggcataatttactttgagttaaacagatttttctcaataattacaccaggaacatgggcataaacctaaactgtctcaggaaaaccagaatgagcagtatatagctctagaaattaaccaaaacttgtcaaacaaaagtaaacatggtgagaaaaatgatcgttcaatggaagttttttcaaaacaatgtagttttaatttacatacagagctataagtaaaaataacccttatatctaggctgtaattctttttccgtgttttaatgtttacataatttaaacacgaatctatcagtgaaacaagaagaaaagattataaattttgagcaaccgtggcaacaaaaccatcaggaccttgtcaatgaytcacaatgatttcctagtattttccagtgttgataccaaaactggcaaggacagattcaaactaaattgctgatactgtgaaataatgctcaccagatgcaagcgccatgtaatgcaagtgacagtttctataaatataattcataactaatattaattttcaaaggacttagcaaaaactaaaaaaagaaatattttattttcatatgtaattttctcagtcagtatttcagagtgaagattagtatgggtatttcttaccccagctaagtataatgtagcaataaatggacttttcaataactgagaagaaaactaatattttagcctatgaaatcattatgtaaatttaactggcttatactgcagcccttatgacttgaaacatctgttcgatacaagttttctgataatatgtgaagtttcaaactgcatattacagcattttgcagcatatttgtaacatgatggttttgtcctttactagataggagactttcaaggtgtgacctgtaacaaggtactgaagttactacttacttcaccatctgctcatatgtattttcatctaaaattacatagcattcataactatattagaaaactgtcttcacacaatttggcacttaattttatgtgttgatatattgcctgaggtccccaatgcagtatcatgataaacaaggaccacagataagaaccaaaaaggagataaaagggtggtaagttggcaaaacacatatgacaaagcttaagtactgaaattgtggtacagccctaaagccttcacacatagactgtatactcatagtttagacacaagttgaacagattaagagtgcaggtttccctttccacaaaagattagaataagtaaaatggaaaagagtcacaagactgtcacagagaagcatgcagcaaacaatacacatgaaatatgaattgggaagccagtgaaaaagaaggagaaatcttattatacggttattcataagaagtccaaataaagccaacaaaactctctggctgttytagcaggcgtataaatgtgtgcaaccattgtactaccattttacatacacaagtaaaatttatatatatataaaaccacctagagatacttttccacatatcacatggagctatgtataatgaaattttgtcagtgttatttatgatagtaatccaaagtaacaatcacttggaggttcgataataaaaatgtggcatatcaacaaaaattaactctaaatggattttatacccaaatataaaacctaccactataaaactttcrgaacacatagaagaaaattttcatgaattctgagtaggaaaggatttattagaaagaatgttaaaaaaaaaaaagcactaaaaatgaaagaaacaaattgctacactgaaattcataaaaatgaaaagcttctactcttaaaaatacatcatttaaaaatgaaaaaggccatctatataataggagaaaatatttgcaataagtatatctgacaagggagtaatatcaagatgtgaagaactcataactttataagaccaataaaccatcgttaaaatgggcaaaataatctgaacagatacttcacaaaagaagatggtcaataagcatttgaaaagatgctcacatcctaattcatctgaaaagcaaaaactgaaaccacagtgaaataccaatacatgaaattaaaacgactaaagttaaaaactgataatactagacacaaacagacatttcgccagagaggatataaaaatggcaaataagcacacacaaagatgttcaacatcactagrtaattaggaaatcgaaattaaaactaaaatgaggtatctttacacaactgttagaatagctttaaaaaatggtaatcccaatgctggtaaggatatgaagaaattatataaatcatacatttgctggtaggaatataaaatggtacagccaccccagagaatagttagaaattttctttaaaaaaaaatagaaaacaaaatttaacatacacttagtacacacttagcactcacaatactaggcatttatcccagagaaatgggaactgtccacaagaaagcatgcccatagatattcataacagactttttttgtaataatcaaaagttaaaaacaatccaaatgtcttttactggctgaatggttaaataaactgtgttatagccatactactcagcaatgaaatgcaaaaaactagaactctcaatacatgtaacacaacaccttggatggatatcaaaggcattgcactgagtgaaaaagccaacttcaaaaggttatattctatatgatttcacttatataatattctctaaatggcaaaattatggagatgaagaacagattagtggttgccaagggcccacaaaagtggagaggaaatggagaaaagggagccaaaagggatgcataagaatataaagggctagaatgaggaatctttgggataacaggaaagttctgcatcttgattatggtggtgtttgcatgaatctacaaatgtgacaaattccataggactatatatacatgtacactgaaatgaatccatataaaactagtgaaatctgaataaggtctgtggattgtaccaacatcwcttccctgcttttgatacagttctaaaattacacaagatgttatcactggagaaaactgggtaaaagaaacacaggacctttcagcattatttttgcaactatgactctatttcaaaataaaaagcttaaaaataaaagactgacaatattccaagtgttgtcaagaatgtgaaggaactcaaactcttatttgttactggtgagactgtcacacaatcactttataaaacattttggcagttttagaaataaagttattatatacttatcacaagactcaggaattccattcctacgtatttaccaagagaaaagaaaacatgacaacacaatgacttgtgcataaatgtatataccagctttaatgatactagtcaaaaactagaaacaacgaaaatatccataaacaggtgaatggataaacaagttgtggtatattcccacaaagaaaaattgcacagaaataaaaagaaatgaactagtcattcaaacaacagcataaatgagtctcaaaaacaagctgaacaaaagaaaccagactcaaaaagtgtatactgtataagtccatttatacaaaatctagtttaggaaaaatgaatccactgtgacaaaaagatcagtgatttcatgcagccagaagcaggatttactggtaaggggtaccagggtactccttcacatcttggggtgaagggaatattctatatattgattgtgatgttggttacaaaaatgtattcatttgtcaaaacycactatacatttaaaatgacattatcttattatatatattataacttaataaagttgaaaatgtggcrtatgcttaaaacagaatatcaagtagcaattaaagattatgaattttatgtacacatggcaacatggaaaaggaggaaagaaccaagcaggatttatagcacaatacttcagcattaatggagagggagcttattatactggtcaaggaggtgtggactctagaaccagacagcctcagctgaaatcctggctccacacttatgagttacatacccttgggcaaattacttaatctttctgtgccaagagggatagsagtacttgccacacagggttcttgggaggatccgataaattaatgttgctaaaagcttaaaacagtgtctgggatttgaaaaatgctatgtaagtatttgttaaaaatatataataaaacagctgggccaagcacggtggctctcgcctgtaatcccagcactttgggagactgaagtgggtggatcacctaaggtcaggagttcaagaccaggctggccaacatggtgaaaccccatctctactaaaaacacacaaaaaaaatttagctgggcatggtggcaggtgcctgtagttccaggtactcaggaggctgagacaagagaatcgcttgaaccagggaggcataggttacagtgagccaagatcgtgccactgcactccagcagcctgggtgacagagcgagactctgcctcaaaaaaaaaaaaaaaagcagccgatctttttttcaaggatatacatatatctaaataaggtgatggagaggaaactgtaaggacatatattaaatactttacatacatattcaatgcaagaagaagaatgcaggcagtatgaaagaaaagtaataaactaaaataaaggggttaatattgatcagtaatgagtgtctgttataagcaaacatagtctgtgcacttgaagtcataaatgggagaaagtacagtcaaaaggcacaactatcaggactaactttatttaaggacaagcctacatacctcactatttgtcttgaattaccagaaccataaataactggtgtacaatgtcattgagacttaagaaaaagagacaaaggcaaagacagaaggcaccaagacagggtacagttaaaaacacacacagacaaatgccaaatacatttgagaaagagtttccatcatgttcataagtaggatattataacaagtcttggacagctgtcattatgcataaataatgtaccacaaaattgaaagctacatgaacatagaaccggccagaataccaaacagtggtggtacacaccagttatcactaaatagctgttaatctcattcaataaccatcactgaatgcctactatatgctaggtgttctagtaagctcatcaaataaataatcttcaaaatgcaacatagaattcagtggccattagaaaaatcaaacaagagtttgtcattttcagaagcaaatacaaaactattattagtggggttttcccagataattctttaaaggtagctgaagcagaaaaaaaaaaaaaaagaaatgygtgattatctacttaaaaaggacacaaagtggatcttttgaaaaataaaatattaaacttattaatgagataacagtttactgtagtttctgatcataagcaacatgcacacaaaagaggaatctcatgtgtgaatttgtcttttttttttaataggaaggattctgcagctaccatgcaaagatacttgcatatggtctgtttacacatagaatttattgtctagccagggcccattttaaaaagaaaagagaacaaaaggactaacggcaatatacaagcacaaatgaacaagggctgcatccttgctgacgaaattgcagtaactacaaggaaagtaattatttcaacaggtatctgaaataaaagctggatagaccctagagaagtggagtggaattacagtaaaacttattttgaaggaaaaaatattaagacatctatagacatataagtatctctgacattctcagttaagaggttcttagttgagtaagtgatactggtcctctgggatcaggtcacagacttacagagtcaaatgcctgtaacaagtatcacacacaacctaaaacactcctggataacatcctgtacttttaagtgcagagatttgtttgcagctttgctgaggtcctcaattctgtttgcatagcagacccacctgaagatctttctaaaagtacagacacggaccccaccagttaaatcaaaatcactagggctggaagtcatatgttgtctactaatcagccaaaataatgagtaaagggtttttctttaattaaattttttttattttgagataattgtagattcacatgcagttgtaagaaataatacatagagatcccatgtactctctagccacattgtcatagtagtgacatcttgcaaaaatatgatgcaaaatcacaaccatgatattaacattaacacagtcaaaatataaaacaattccatcaccacaaggatgccttctgttgtcctttcatagacacaaccaaactccttccgcacccatccccaactccaagtcctgactccgggcaaccatttcataattttgtcatgtcaagaatcttatataaaggtattcacttgtgacctatgtgcattagttttctttgatgcagaaaaattccctggagattcagccagattatttcatgtatcatacctttccattgctgagtaggattctaggtatatatgtgtacaattaatttcaccactgacagttgcagaacattcaggatgttgccagtttgggcccaccaataaagttgctacaaacattcatgtacaggtttttgttggaacataagttttcatcactctcagataaatacacaagagtgcaattgctgggtcgtatggtaattgcatgtttaggttcataggaaactgccacactgttttttttccagagtggctgtacaattttgtgtatcctatcagcaatattatgagtgatccagtttcctcacatcctcaccagcacttgatgttgttactttcttattttagtcattctgataggtgtgtagtaataacttattgtgattttaatttacatctctctaatgcctaatgatgttgtacgtcttttcattgtacttatttgtcatctgtatatcttctttggtaaaaagtttcttcttgtcttttgttcatttcctaattgaattgtttattttttgcagttaggttttaagagttatttatatattctagacactgggggtttgtttgttttgtttttttttttggcaggagatatggtttgcaaatattttctccaagcctgcagctttgtctttccattctctcttaacaagagtcttacacagaacaaataaggcccaatttatcaatctttccttctatggatcatgctttcagtgtcaagtctaagaactgattgcctagccctagatcctaaagattttaacctatttttttctaaaagttgtatactttcatattttgtatttaagccaatgatccattttgagctaatttttgtagaaggtatgaggtttaggtcaaggttcattattttacctgtgaatgtccagtttctccagcatcatttgttgaaatttctaaccttcctccattgaactatttggctcctttgtcaaaaattaagttggccacatctgtgtaggctatttctgtgtttcatatactatgccattgatctatgtgtctatccctccaccaataacacattgtcttgaatactatagctatacagtaggtcttatcaaaatggtttttaaatgtaaattacgccatgtcagtttcatgctttaaaaaaaaaaaaaaaaaaaaaaaaaaaaccttaagaattccctgccacaattagaatgatatcctgactccttatccaggctcacagagctgtacatgactagattcaccagcctctcaggtcacacctcacactgcacaggcccaggtcagtacccattagcatcaccagtctttttgttctctgagtacatcttagtaacttcactggaatgcccttgccccagatttctacaaggttagttctctgtcatcagttctcaactaaaatgttacctcctaaaaaaatacttccttgactatccaagctatacaaacacccaagtttaatcctctacatatcagttagcactacctgaaaattttatcatttatttacctgttgtattgtctccctgacctcctgaaccaaaatataagtttcatatgaacaggatccttgtctgccttgttcagcagaccagcacatagaatagtgcttgacgtccctatttatgaagtgtggcatgaataataataagtacagcaataacaaaaacacatctatacatagcacttgtctaaaagctctttcgataactctgtgtgtgtgtgtgcaggcacatgcgggctcattcagtcttcatgataaccctaggaggtgctattactgttcccattatataaataaaagaaattgaagcacggagaggttaaataaccaaatcaaggttacacatctactaaaagagcattagtcatcacacaaaaaaagtaatgaaataaagaatttgtttttctctttggcttatcttatggagattatgacaattaccaaaatctttattacctagaatcttttatttggtgacttatagtttaagttccaaagaaaaatattgccatataaggaaagrgtatgacatagaatacacctgaaagagagttttcttaatatgactcgtttgtgagataatttctggggctaccacatccctggttttacactagagtccagtgacctgaacctccaatactgaagtcactaaattttcttcacaaaataactgtatcctactagcatcaagacagcacattacactgccatcttgcctccatccttgaaattttagaaagcaaaatatggcctcatacaaatatcatttggaattctgaaactgcaaagatacccaggactcaaatgtttaaaaacccaaatgcatttctaagtatacattttcccccttagattgccttgttctgctctaagtatcctcaaagtgctttgattttttttctctaagtgagctatagaaatctgaaaagttaaaatagcatgtattctttacagatcatttcatcattgtatcaactagtaagtattagcaatttataacgtatgaatatgttctcactctttccttaaagagaaaatcacacagacatcagaacaatgaatctctggctgaataaatttaaaagttcagtctcataaagcaaattttttgtttgtttacatatactcacagtttggaagcaatcaatcttgattatttatttctgcaatgcttttacttacctctataagtgctttgggatttgwtttctatgatcatgactatgcaaagttagggcatcctatattttattttgtgggactcctttcatatttgtgaagaaataacttaaggttgattctcccattctttaaaactacacctgatccatatgtcagaaataataatggcaaaaacaaggcaatttttcaaaactgagttgacagtttttgaatattaagcttcccaaagatatgggcttcacacatttctctgtacaatttctaaaaaggaaacacaaaaatcaatctcaccacctttactagggttcttcagggatttcataaatgctttttggtgagacctcatcatttaatgtgcaataaaagaaaaaaaggtgtgatggaaggaacagagttgagggaacaactactaaaaccacaaacctcccaaacgaactttactctgaacagaataaaataccctattgaatactctaaccatcagttgtataggaaaagaaaaaaaacataaaaattatctcatacattaatggaaagtttattgcatcagaaagaaaatgaatttccatatactgttaatttcatacactaaaatgaattgaagaaactaattattcataacgaatattggcctttgggaaacactgcttcctaaaaggatttaatggtcaaagcttgtgtgaattattatcatgaattaaactaatgaaaggatgaagatattgttaacagaagttctgaaatgctaaccttgccatttctgtcatgagatgagaaatcaatgtccaaataacatgtgcagttaaagctttaacaggaaataagtgccacagaatctacagaaagaggtttttcctatctctcaacaaaaaatatatgaatggaggtaaggtggagaaaggggacaatagtaaaaatcatgccccaaatggaaatgaaattagcaccctgagaatgaattgagaagagtaaaaattaacgttcagccatttgtagaatattgtgagcccataggtgtgtatatatataaaatgtgtatatatacatatatataacgtgtgtatatatatgtgtgtgtgtacatatgtatagtgtgtatataaaacacatatatgggtgtatatacatatataatgtatgggtgtatatacatacataatgtatgggtgtttatacatacacatatataakgtgtgtgtgtgtgtgtgtgtgtgtgtgtgtgtgtgtgtgtgtgtgtggtgtatcctgtaaagaggaaattaaaccatctgaattatcagtgcccaaaatcaagatgacccacatgttactttaaaaaatatataattagaagggaaatttaagaaagtttaaaccttacctttcctattttcctcaacaaacaaaaagaaacaacaaccaacacattcaaaaaaattgatctacttgacactgatcaaaggaaagtctcggaaataagaatttgaaagtataatctacctaagagagagggctctttgttggagaaagtggctccagatttcagattttagttgatgacaggaagtgaaataagaaaactctttgacaagtgtatgaatagagaaactttgtcttgtttttttgatgaggtaggttgttttcttttgatttgctatgaaatggcatctccagagtcttgcaagggttaagaagagtgggaagctgggtaggaaaaaaaaatccaagaagagtacgagcagagttggagagagggctaaattattagaaaaggaatggcactttgtttagcaacccagaatagcagtagtgtgaagctcagtgggatcagctggcttcagggctttacaaagaaatccatttccctgagtgctaaatattttttttgagatggagtctcactttgtcacccaggctggagtgcagtggcgcgatctcagctcactgcaacctccgcctcccaagttcaagtgattctcccgcctcagcctcctgagtggctgggactaatggcaaattaataaattagcactctgatttatatatcagtaataccagaggctgcagtgcagtggcacgatctcagctcactgcaacctccgcctcccaagttcaagtgattctcccgcctcagcctcctgagtggctgggactaatggcaaattaataaattagcactctgatttatatatcagtaataccagataacatatatttatgaatttgtttggtgagtctatcctggaaaggctaataaactttaaaataatgaagaatcagctttcaggtcctgtgaagctaagaaccatatcctagaacctggtcttagaaccaacacactccctgtgagaatgtcactaacctggatgagttctccattctattgttctctatctgcattgctttacacaaaaagtggttgataattaggtaaactagcttctgaggaaaagtggtggaggccagaatagggcaagggaatggatggctgctgataccttctagaaactatcacaaatttttataataaatctctaaatatcatgaaatgtaaaaaagatggcccaaatttgcaaggatcactttgatatctttgtttaaataaaatttatatcaaaatgtgtgcaatgactatcttttcctcttcttcattctattttacatttctaaattttccaaagtacatatatacaattttaatcatcaaaaaaatttataaattcacagaagatttttagagcagtgaaactaccctatatactctagcagtggatacatgttattacaaacttgtccaaagccatagaatgtacaacatcaacagtgaatgctaatgtaaaatgtgaaatttgggtgatgatgtgtcaatgtcaattcaactgtaacaaatgtaccagtttggtgggggatactgataaatggggaagtctatgaatgtatgggaacaggagtaggtacatagaaaatctctgtatgttccgttcaatttctctgtgaaactaaaacttctctaaaaattatgtctatttaaaaaattctagcataaatctgtctttatttatttggtatctatgtcaacaaattttcagaaatatttaaaggcctttcatttttatatatgagatcacattgattatcactggactctgtgtgtgtgtgtgtgtgtgtgtgtgtgtgtgtgtgtgtgtgtgtgtgtccagttttaaagcagaaaaggggttactgactgggaagctgtaatgatgagatctcttgataaagtaatgcagtgtaagcaatctttagagactctttcaatttgatgatgttttctgacttttatcctttgggctgaatcaagaaaaataaaacaatttacaaaactaagactctgctacccacagcaaatgggggaggcagggaagactatattgattgtcaatatatagcaacattatattttttaaatttatccttatgaaaattatctctcattattaaaagagcttctctgatgtttaaagaactggttaactatattctatatakatatatattacattctaattatattctatatatatttttctatctattttctttatatagtccttagtttatcatttctgtccattttctacacaaataagatgggaacctcaaaaaaggaaataagcacctctattatacaatcttaaattgggttagaaaacttagtaccttacttttggatcctaaaaaatattttattgatatattccagaatttaagatcttaattttcttatatatttgctctaaatggcacttgaaataagaaactaaagagtgattaatatttggccaatgttacatgaatgttactatttatcttgttattcttattttaacagtatttaccaatactgtcgagtcactaagttttgatttttggttccactccttctagtttcacttatgcattttagtcctgatctttgcactaaacatgcttatgtgtaccatattctgtaataaaatataactaggcaaaaactatgattatctacctcgcagtaggtaaaaatatagaaggttccagagtgatacttctcaaaattatatctgctatatataacatataaactttgcataaaaacaatataccattataaaatataattacatacattttatatatatagtatttattaaatcgagaaaatattttcaagttactatgttccccataagttttaccatattcataatttacagtttgtttttattccttgagagaattttttttcttacttggaactatttcctatttgttccaattgtgtttccaacttccttagaaatggccatagcaatacaatttttattgatatactagctcatggggcattgtttcttgttgttaggtgtaaatccagtaataataaaaataagttccataaatacaaaacagtaaaattcaaccaaaatcaggcctgatattaaggggatttgaatacatatacagaatataattgaacactttaagcaattctacaaattttaagaaatagagatatagattgagattttcacaaactaaaacaattatagtgatatagttcaactcagtctcttaacttacaactatgcttgtgcgtatctgtccaaattcaattgtatttctggcctataagattatttgcttcaatcaaccaacatagagaaaaaaatcccaggctaaaaagtaaatataatgtctacactggcagtaccctatctcacagatatattgtgacaaaatcttactattaatatctgtaaatattatacacctttcatgaaaatatgaaagctaaataaatatataagggtaaacaaataaaatctaaaggtaaagttttatttggtgcatttgagaaaaatacaaaagaaaaggaaactttgggtcttattggtgatgtaggaatctggagattgaagacgtaggcagtggggatagtgcaggagtgaaaaaacaagcagttacaaaaaattatttaaacttgccatcttaatgtaatatgctttgagtcggcctttatttctatgtatggagaacaaaaagtttctaggcagaaaaatattataaaattgrtagtacagacagtgaactactacaatttaaaaacatctgactctttctggccaatcttactttaatggtatcatcatacaaaagaaagaaaattacatggaacaaatgagaaaaaaaagtacctttgtcataaactttcaaatataacattataataaaaaattctcaggagaaattttgggggaaaaaaagatgtattcttcaataataatttaacttggcctaaattcatgagaatatcctccagttttgcaaactgccttcaatttgctgagaaccattcttttatgccagcttaaaataagcaaagattacacaagtaccatgtgccaccttaaataaggaaagggaaaaaagtacaatatggtatttaaacagctgtgtgaagatactggttaaaacaagaatcatttttcagctgagcttgtaatgcttcattttgctaaatttaaactagtgcatcattaacttaaccactgatttgtagaataaagtacagaaccgcacctgcatataatccaataaacacaataatttttcaaatggttgtgaaattgtcataatttgggatcaagatttgagagaaggaagaaaaaataagaagacattatttcacagatgtactggagaaaatacaattgttttcattatttgcagttttatttgagtgagctgacaaatgtacaacaaacagtacacgtggaaacacactagtaagaattctatgccaggcaattagtgaagatgattgcaagaaatcaattttttggaaataaacaaaaattttaaatgttatatggccagtttggatgagtattataagtaaatgagctcaaaccagttaacgaaatggaagaaaacagagtgtgtgctcaaaataattttgctcccaaaggtccataaggaaccattwagtatatcagaagtattcatttactatgtggtatctccctggtmaaagaattgatactttttcacatagattcactcagtcttgtctttccactatgttagaggttttaaaccccaccgaaaagttcaatagatacaatatagggaatatgattcatgtatttggatgaaaaaaagatcatatgcttattttcactaacaattagctaaaagtttaaatttccctttattaagaatgcagacaacaaatcacagtagtatttgttgtacttgtgaccgacagaaataatatatattttgaaatattgttacactcatcactaactccaaaattatagtacctgttagaagtaatgccgcatcccattactattactattcatgtattactattttagagattttaaaatattttgatggcactatttcaatttagtttatttcctttacaatcctatgcatttattttgtgcattaataacattctggccgggcacggtggctcacacctgtaatcccagcactttgggaggccaaggcgggtggatcacctgaggttaggagttcaagaccatcctggccaacatggggaaatcccaactctactaaaaatacaaaaactagctgggcatggtggtgtgtgcctgtaatcccagctactcgcggggctgaggcaggagaatcgcttgaacccrggaggtggaggttgcagtgagtcgagatcaccactgcactcaagcctgggcaacagagcgagactccatctcaaaaaaaaaaaaaatctaagacttttgagttcacatgcttaatttttttttttttaattctgagactggatccacgaacttcgccagattggaaaaggggtccatggcacaaaaagtattaagaacctctcattttcaatttggcacataagataagggaaacgtagggagacaagaaactctatagcttaaaattaacttttatgttaaagttttgtttctgttggtctttatttttaattctggaagagcaatcatcctaaattaagccaatcaaatacatattgctttaagcactaattaacaccttcttcttctaccttttattagttctaagaaatgttctttggtttaaaattttccactaataatggaaaaagtatgaaatttcttatccttatttaaccattttaaaattaactccaatatgtactacattatgacagagcagattttacatcgccctgacagtaaagtatactgcattcttggtcagatgaatgtaatgagcttcttgtaatcctggctaattgatataggaatgggggaaggatttgcaagatcaatagccgtataccaagtgccagagacaagaatgactggctctagtaaaaaagaacacatctagaagagtatctccaatcagaattgcaacctgattaaatttaaaacagagcattatggtttctaacgcctattctcctttgcgcaaggcaagtaggtgagtaaaatgagtatgtgctaaaaatctcttttaaaatttttaagtatttaatagcagcggtaatctctgacatttctctagtgaatttactgcttttgatttgctctcctggatgggagaacagttccagggctttccacttgtccccttctaccacaatatccttcattccatggttcagaaagccaatatggacattctgcaagctacagaggatatctagtcaaggtaagcattgaagaactggacaatgatcacaaggtagataaacaaactccctggaactacagtaagagtaattcaagttacaaagaaagaaaaaggaaaagaacatgagagaagggaaagaamgaaggaaggaaagaaggaaggaagaaaggcaggcaggcagggagggagggatcatttggtccccataaggtcacactttgacaagaacaatggtcaagcattttgggtctcccctccctgccaaggattagtgtcaagtaagagccatgtatggtaatccctgaaataactaagaatttccctttccacaatgtacaatcatcctggtaaatgactgagatcacactggggacaacttgaagaaagatttttggtaygtatttgtagcaatactcatgctttatcttcagagggatacagttgccctcatttcatttaagggctgtggctctgtgaactggctccggtctagaaactgagtgagaggccatgatgttgtatcagggtgaggaaatgagttttctgctcacgacatcaattatgtttctgtaccctagagtctgtattttagtgatatttcagccaccatcaaaaattaaaagtttggtgtcacaatagtctgattgtcactctggctcttccacccattatcgcaattgtactcactttgcttccagtgattacactgggacactcagcctctgccactccagaattccatcattccattaaaatgagagagtctattttgaaagtagcacctaatatcacatccaaggcaatcagaatacagccttcccagatttcttcaaggacactgatgttcccttcaccaatgcatttctcaatatttccatgaggaaagcatttgtgggtcacacatgataaacccactgcaacattcctatctccctaaggctttgggatattttcatgcaagactgaagtcactatggccattacagactcttcaagaagagggaatttaatctccttagagaaagaagaagaggttggttccacaataaagcactggggaaactgcagatgaagcatagaggaaactggagttcaaggctctgagatttaggtgagttcactcacataaatatattcatttcaattatcatgatccatgtctaccattcatgtcttatcttccatataagaaagctagtgaggctgtgaattcaacttgtactgtgattctataattctcagaactgaagtttggttcttattttcagctgcatcattactgcaatgataaaagacaagacaatttgtgttggcagtgggagtggggaggggatcatagatctctgtttacgtgactatccttgaactgagagaagtcctgaacccataatttcctttctataaaccttctagtgtagtcaaaaacagccaacaggagtcattattcaatccataacagtcaattacaacttccatttgatttcccaaaactttgactttagtaaacacttcatttctgataagaaaggtgatacattaagtaactgagctgaccctgcatggaacggcaattttccactggcaatgatatactattgtgttcaattgcartatggtcagataaccaatctcaaattctcatctttgaaattctgtctcctaaaaccactcctggttattgttcactaaagaaagcagaaactactatagacatttccagaataggaaatttaataccagaaactgattatacagttgttgaaggggttagaaaaaaaaggaagaaataaatacttgaaggcacaaaacaaaaacagggtttcaaaccaaagtgagggtgctaccccactaggctggagcccacaagcctgcagtaattgctgagctcctggaaaaacttctacaggtgccactgggaatgctctgttattgctcaacagagcctatactgtccagcagcaggagtactgctactgctattcaagatgccaacactaatgcttctggaactcacagccaccagaggtcaccttcagtatcctcttctgcatgctgaagtacaccatccaataaaaggaaawaaatagctgcttcttctctcctaccttacaatctttcaagattgccttgctttggctgtacctaatagaaaacttgctagcaatggaatctggcatgtgtggttcacaggttttatatctttgcagtagagtgtggaagggcagatatatagataagagataacagcactaactgtcacaaaaccaaacaataatggaaaaacagaatgtgatgcattttatcttctaaccatttataaaataaattaaatatatgttttatggtataataataactgtaaagaaaaccaaatactacacaagcactcaaaatgccattctcaatctaatcttaactttcttaataatcaacaaatacttactgtgtctatgttcctgacattgtgacaaatcccagagttacagatgtaaaatcaactataggagtttttactctcgtcaggaaatagaatcagaggaaacagacaaaatacagtaaataataactagactatgtgtatcaggtatacaggagagccaactacaacagccaagaagggtcatagatggtgtataatttggatatttgtccaatccaaatttcatgttgaactgcaatccccagcactggaggtggggcctggtgggaggtgtttggatcccaggggtgtatgtttaatggcttggtgctgtctttgtgatagtgagttctcgcaagatctagtcatttgaaagagtgtggcactttctgccctccactctctgtctagctcctgcttttgctgtgtgaagtgcctgttcccgctttgccttccaccatgagtaaaagctccctgaggcctccctagaagcagatgctgctatgcttcctgtacatcctgaagaactgagccaattaaacctctcatcttataaattgcccagtttcaggtatttctctatagcaatgtgagaatagcctaatacaggcggcttcagggaagtgacttggggaaaaactagggcttctaaagaatacaagaaaaaataatatttcagatcagaaaaacagcatgtatggaggcatacagacctgacaaagcataagatgtcctggaaagtagaattgtatataatttgaaatatagcaaatgaggagataatcaggaatatgccgaagaaaaggttagacaggcaaaaggtgagcaaagtatgattctattaatatattgctcatacaattgattgaatgatgttgcatttgaaattttttaatttaaattttagaaagataattgccagaggaatggaggattgactagagtgaataagatgaggaaaataagatcatttagaaagctgttctagtataggataataaaactgaagtaatgcaataactactgaagtaatacaataaactgaagtaattcccacttgtctaggaaaaagctagttctcctcctccttctctatgcaagttccccagcttctaatcaatctatcagttaagcccactttaataactattaatatgttttcaatgtccattttaataactgtgttttctacaagattaaagaaataaaattatcctatagatttttctaaacaaatagtggagacctatggaatataattgcaagggtagtaaaaatgtaacttaaattaagctgtgaaatatattctattttttgtctgctattttgtcatgactgtttgacagaaaatctacccttttaatatgccaaattcacacatattaattaggagaactagaagttaaccaaagtaaatcgggaggaaaatattttaaaagtatacgtgcatatctcacccaaagaaaaattccgatttaattctcacttcttttaaggtggccctcccccagaatatcgttgactttttaaaacatatcataaggcaaacatttgtgacgctatcacagtccatcttatacaaccaaccaggaaaaatatcctctttaatcaaaatcagtaattttgcgttaagcttcttttattgatatgaaaaatttgggcagtcctgcagagagaagtccaaataacacaggaaactagccctgacaggtggtaagacaataggaagaaactagtatttcctcaggatcttgcttatacatatggtacttatgatactttactaaaaagtatttatctgaatccttcagtagcctatgagtcccttaatggcaggaaatgactgaaaaaaaaaacaaataaataaagtgaagacagaaacgacatggatttctaaaaatatttctgatgcttctgcatttcttaaaaatttacgtggatattttccaggatggacaattatctgtgcacacaatgcaatttgctcttccaaatcctttctaccacagcttcagacttaagctctatttaatgtaaaccaatcatagtaataccttcctcaccgccacgtagtctttcagtaatgaatgagactacgtccatttaagcaaacaacacacaaggaaacatttcctagtggcttcttaaaaaaaaaaaaaaggcttcatttttcaactaataaaaaggtgagtattacagataataactacataggaatgtaaaaaaaaacttactctggctatggaagtctgaaaagacttcatgtaagagataaggcttaaaccacacctgaacaacaggaaagtacagttatgcatcacttaatgatggaaacacattctgagaaaagcatataggcaatttcataattgtgcgaacatcacagggtatacttacacaaacatagatggtatggccgactacccctagcttatggctcctagactacaatcctgtacagcatgtaactgcactgaattccataggcaattgtagcacaatgatatttgtgtatctaaacataaaaaaggtacagtaaaaacatggtattatcctcttatgggaagaccatcaaaaacacagtctatcactgacattatgcagtggcacatggctgtatctgagagtagacaggaattacaactgggtggatggtataaagaaaggcataagaagcataaagagtggaggatgttagatgtattcaaagcacaagccagccaccccaagtaaaagactcatagacaaagaaagaacatgcaggaaacaaaagtcgaaaaaagggcctgaaaaccagaatatatttcattatgttaagagccaacaaagtaaaattcttagttatgatctaaatgtatgatttagggatgaatacatagttagggagaaaagaaaaattatttagccatgaataaattaatccaggttcttattcatcaagattccattttgaagagggctgccgcttaggaacactcaagctacgagggccataaatttaacacacacatttctttatgaaggagtagagagaataaacaaattttttaaaaagtaaagggagaaaagggaaaataaagtaatatgcaaggacatccgatagtcaaaatgtattatctcataaatttatatgcttcagtaaaaaaattatcatatttacaatcaaaaaaggccatttgtaaagaatctcacatatattatctctgtcaaatctcacaacaacccaatgagagagatattgttggctccttttttttttcttttttttttttttttttttttgagatggagtctcgctatgtcgccagactggagtgcagtggcgagatctcggctcactgcaagctccgcctcccgagttcaagtgattctcctgcctcagtctctcaagtagctgggattacaggcacgtgcaaccacgcccaactaatttttgtatttttagtagagacggggtttcaccatgttggccagaatggtctcgatctcctgacctcgtgatccgcccrcctcagcctcccaaagtgctgggattgcaggcatgatttttggctcgtttgtacagacatgaaagtgtctcaacgtggttaagtgagtttggaagagccagattattatccaggcctctgactttacatcctgtacccactcmggcctacctcatttcattcaagagataagtacaacacaaagttcaacaacatctgaagccattctgaactagaaataaatgaagattctaattgtcagtatatcattattcagacataatgtagaaacaaaggattttgccaagcttaatatggtttggctgaatgcaagatttatatattaagatccaacattatatgggcaaagaaatactacctgactctctggaaattgaggtttatcaatcagactccctagatattcagtattttgaagatataataatactgaatcagagacagaaaaaaactagtaataaaatactcaaaggtctaaaaattaaaggcaaattttcttagcaaagagtacatggcattctatttaaaaatcaacaatytgtcttcattccccagatcataaacccaaggagaccattataaggctgctacaracaatctgtcagtttgatttcacttggttagtgagggtgttgattttgttgttgaactgcttaagaaaaatttaagatgcttaaagaaagttctttaaacatattaataataagcttttcaaagtctgtgaatttaatatttcattatttccttgaacctgttaragttaagtgaaactttgaaaattccaggaaaggttcaataaaatttgttatagattctacatggtctcattttcctttacttaagaaaaaataccaaataggctgttatattttgaaatctacattttttcaatctgccctttaatgagcaccaattatggtaaataaatattaacagaatataaccacttacttataatgcaatccttataatgttatatttatccaagccatgaaggattagggaagtaaaaactacactagcttatgatttagcagttttattttccaatataggtcagaatctaaaaagttaaagagtgaaggagggccacggggcctttaaggagcccaaatatcagtgtaaatgaaagggtgattgattctctcctcaaagcagatggcgtcctttccccagatgcctggttaatacagatgtggaagccaatggagaactcaggttccttacaaagaacagaaaaggggttgagcacacaaacaattcaagagttcaagggctggtggtgaaatctggtagtaacagattgcagacacatacagatgtctaaaggaaacagcaaaaggaagatctgggaagcaactccccaggaaaagattttaccatagaaatcatcatcatcattaagaagcctcagatcagatgtaacctatagcagatctgaacatgactaaaccctagacaaaagtaattaattccaaaacagtggtatggatcaattcaaatgagaaattgattttctagttctgaggtgcaatggcaaacttgtaagtcaaatgatatcctagaagacagcactttttaaagacaataccttaccaagccacttgaagacggaataactataccataatgaagaaaaatttctattacttaatagattcttttaaaaatattttagatactaaattaggactattacataattggtattatctatatttcaactatggaagtaacagttcttcatttcaattaacaagctaatatactgtctattcatcatgattcgaccattagccagactttgctgaataattctaagattagcctgccatttagccacaagttagccaactatatagataagtgaactattttgctatcattaccttaaatgttgtccacacatcacaatgaccaataagaaaacatccctgtcctaccatcctggtaatcagaaaatcaccatgtggcttaatgtaaggctaagtaagcgttaccaaatatgtctgtaggagggcaagtctgagggcacgattacactttcaagactttgtgaggaatcatttgtaatcttgtcacactcaaaaaaagtgctgagagcattcttttttcaccctcacatcatccagagaactgttcagcaatataaagctgtgaccttgatgttctatatagcttaaagaccatagttaaagtcctcataagcactaaaagtcatctctgcacaggaagtagaatatccttctacactaatgtgctacatattatagatttctccaatatgttccaaatataatataatgttatttccaaaaccgtaaaaaaaattcatagtttagcagatctaagtagaactccttttggctggtgagatggtgggaagagattagggtagaaagtggaagaagcagagtcataagagaatagtaatcagtgaactaccaaaattttcatcattcaaaatttttacaaatcaaaattttagctttaaatcaattttatatgtttggtttcaaagatcagccctcaataacaaccctataatctgttttaatacagaaggctatattctatagcgataagttctattttagaaaagaagcaatttaaacctaagtttttttagaatgttagcataacatatagtatgaaacaggaaacaaacagattaaaggaagaccagaacattggctgaaaatacaccttcagggcccatttccaggtaatgcccaaggcctcctaggggataactaatagttaatatttcggctgccacattccatgggaggtcgtaacaatgactttatataaaaattatttctatttttctcttttatttttaacttagtactattaactggagctctttcttcccttgttaactattcattactgtatatttctgtgcattaaaaccactttaaaaaaaatcttcatccccacatcagcctccatcgtgggaagatatatatacacagaaagagaggaaaagtcattgatccccagccataagtcaagtgaggcttcaacaatagatcatacccaggctgcacactgttaggtcacagaacatgtggtcacactgtcctaccaagacagaagctaattctatgaaatcccaaactacaccttcttgtgtttctccattcacctcagtcaatggcttcaccaccatccatccaccttcttactcaaatcagaagctgaggagccactctgcctcttcccattcttacagtccaaattcttgttcactcatgcaactattcatttctctctcacttcctcagcatttgcttcagcccatataatttctgacctaggtgattttatcagtttcctaactggtttccctttctctggcctacaacccataaattctaaaacacaatctgaataatctttctaaaacattttaggaacaacccactaccctcagatcaagtccaaactctttaacactgtttacaaggcccttgataatctgactggttgctgctcacactgaactcttaccactcccactgtggtacccaacaatgccaaacaatttgaaattactcagttactcatattctctcagtactaggcaccaccattcctcatccagaacactaaagcaattgagtttgattcaggtgtaatcctcaagaaaacattgttagacttctccagtttctccaggtgacacatctgtgtgctctgaaagcaccctatgcttatagttatcataccatacagtactgtttactttgttcttcctcccccaatcactgattattagatccttaaagtacaagcaacttattcatatttgtatcataatgactagaatagtacttggaacaaaggagacactcactaaatgtttgctgaattaatgaataaagatataaatgaaaggcggtatgtgttccatgttttcttcaagaaaatatggccaccaaaatgtgtatgaactaagtattctccaatctgcccaatggaaaaataaataaataacagctaagagtttgtcataaatttcagggcaatcctaatgaatctaggaaagtcaattgatcaagaggctacatcatggccttttgatttgacttacccttatttgctcctacgataataccaaaaaagcatctgtccatacagtgagaatgtaagtcaacacacaattggctcagggtaagcagattacaactctattaaaataaaagaattataatcaaaatcctgcttccgtatatgatttaatcattgcacactgattaaataaatgacaataattataaagaaaaatctccatccattttgagtgctcctgagaagctagagactactcagatctctgatttgaggtaatattctcaatgtctcaaattaaatgcaaatattctcatggaaaaaaaactacaacaatctttttttttctctaaattattaatatttatctttgaggttgagattctcaggtttttgtagtacatcatgggagtgatataaaaggagtccttaactgcaaatcaaaattttagccttaaatccaaagcttgctttactatatagctatgctctaaatcaccaaattcagaaatcctttaaaatagacacttgaatgtggtttcaatgtaagcactctcttagcagactcactcttcaaagtccaaaatgaaagaaaaattatatgctcagcagtttatttaattaaaaggaatggaactacagagtgataagtatagaaaagttcagcatgtcttttcaaaggactgtaaaaaaaacttccaacactttacttatattcttgcccttgtgactaagttatggacawtgaaacaccttgagttatgatacaaatccttaaacctaaaatgccatatgttaaaactcaaattatgttaaagcccataactattttaaaaccctgtgtataatgtgatctactgcattcacagtacttaaagtactttcatttttgaacttttataatttctgcaagagaaaacaatgccaagagacatccctacagtaattaatgtaagataacagctttgaatttacagttattggtaatttaattagtcttgaacatagccactataagacttgataactactaaacaattattaatgaataaaaggctggcccccagattcttttatgccagacccatggaaatagtatgtgccagataaatagattctcaataaatatttattgaggtcgaattgaccccatgactggttagatgcagaattttagttcacatcatatagacattctgaaactgaatttaacacaagcataatatcagcataatattatactgaattgtacagacagaaccatgagtcactttctgctccaaatcaatgaaatgttgaagtagaaggaacagcataagaattctccattatgtagctaagtttgaaacaatggtagagaaatctccaggtcccaaaaaatgaaaaagaaattcgatatctgggtggtagaaggaactgaattttaaaaaaaattagaaatatactaatattagtaatattaatactaatatacaaatacatttaatagtggtgttctcagatcacgacgcaaaatctccccaagaaacctactaataatgaataataatttacatgagaaaaagaccttttcacctgcaaattaaaaagcaggttaacatttatgggtcatggtaaaagcacttctccaaagaaaatccatagcattaaatacttacatattttttaaagaaataaaatgaggaatgcatctatattttatatcaaagcctacgtctcccagctttgttcatagcattaaatacttacataattttttttttacaaaagtaaataaaatggtgaatgcacctttgttttacacggacggctgcatctcccacatttgcaaactcttcactgtaataaactctctttcttcaaaatgaaaaaaagaaagcaaataaaatgacttaaacatttaatttgaaaagctagaaaaagactgacaacagaaaacaaaagcagaaggaaattaataaaaataaaaatgaagtcagaaaaacagcaaaattaataaacagatcaaaaagctggttctttcaggcaacctacagaacaggagaaaatttctgcaatctactcatctgacaaagggctaatatccagaatctacaatgaactcaaacaaatttacaagaagaaaacaaaaaaccccatcaaaaagtgggcaaaggatatgaacagacacttctcaaaagaagwcatttatgcagccaaaaggcacatgaaaaaatgctcatcatcaccagccatcagagaaatgcaaatcaaaaccccaatgagataccatctcacaccagttagaatgacaatcattaaaaagtcaggaaacaaaagctgcyggagaagatatggagaaataggaacacttttacactgttggtaggactgtaaactagttcaaccattgtggaagtcagtgtggcgattcctcagggatctagaactagaaataccatttcacccagccatcccattactgggtatatacccaaaggactataaaacatgcttctataaagacacatccacgcatatgtttattgcggcactattcacaacagcaaagatttggaaccaactcaaatgtccaacaatgatagactggataaagaaaatgtggcacatatacaccatggaatactatgcagccataaaaaatgatgagttcatgtcctttgtagggacatggatgaagctggaaaccatcattctcagcaaactgtcacaaggacaaaaaaccaaacactgcatgttctcactcacaggtgggaaatgaacaatgagaacacagggacacaggaaggggaacatcacacaccgggacctgttgtggggtggtgggagtggggagggatagcattaggagatacacctaatgttaaatgatgagttaatgggtgcagaacaccaacatggcacatgtatacatatgtaattaacctgcacattgtgcacatataccctaaaacttaaagtacaataaaataaaaaaagctggttctttgaaacactcaacaaaatagaaaaattactagccaacctaataaataaaaaggtgggggagattagggtgaaagcccaaaaacacaaagtgaaaaataacaaagaagaaatagtcatcaaaagagatgaactgaaagagaaaatgaagcacaaagaggaaaagaaatctattgtatatgcaaataaatctgaaacataggtaaaataaaatttcatttggcaaaactgaccataatagagagagaatgcattaaggaaatgcctaaaaagggaagtaaaactaattagtcaactacagaccataattcatcagaggttccttaaattaagttgaggcaagtcactctttttcaagttgagaaaagatgctataaaacatgaaggcatgtttgagaaaaccagtaaatatttttaacaatagttcctagagtcaaataaaaaattcattcaaaatcatgtgtaatataatgtttaagtgtaatatattcaaatgagaaattccaatactatattccctaacaaagggaaaaaaataaattatagctaaaaaataaatattcaatatcaaccaatatcaacaacaatctgtttattgacaaaatgtatttttagtttttaaaaaacaataaaaggtaaataaactaaaattcaaagtgcaaacaataacacaccaaagattttttttgaatactgaaaatctaggggaacaactgctcaacatttggttgcttcacaatctgttaatttttttaatcaaatatgactaagataagtctgccacatccataaaaacattaactgaaattaatatgcaaattatggtgcctgtgtgggatgccatttcattaatttcaattcactgacataattgtgttctctgaatttatgagatttgcaaatgccatctcatagagaatgcaatgttcagtgaatgttattttactagcataaaacccaataataggttaatccacaaaaaagaaatataagattttagttacaaaataatatatgttttcatagctgtatattctttgagctaattcttagagctttttaaaataatgtttaacttttaatataacactgattaatggtagcaatcttggaaagttcaaaaaggtatataaaatgagaaccttttaaagattagctatctttaaattataaataataacagtatttggtatattttgcttcaatcttcttgtatgcagataagtacaaatgtgaaagcgcgcaaaataaatataatgttttaattccattttttccacttaatatagctatagatattttaccatattagtaaatgaattccaaaatataattttaaatgaatgtatattaagatcatcatgtggacctaccaaaatatttttaatctttccattattttttggagtttaggtttttttagtgttttaatagtataaatccttctgtaatcgagcccttcatgtaattatttgtgtctctgattatttccttaacaaaaaaatccttgaagtgaaattcctgaatcaaaggatgtaaattttaatatatcatctaaatacctttcaaaaatattgaaactttacattccgaccacgagtatataacttctattcccttgaccccttttccatactacattctatcttttggcatcatcagtgtagtagatcaaaatggcatctcacagttgattcatttgcatttctttattagagaggttgaacccctcatgaaattttactgtagtaataatgttctggaattttaatttaaattataatgtagttttgcctataactgaattgtgagcaacattgctatttataatttattactgcttgaagttgcatactgtaaaacatgctgtgtttaaattatgtacagtatttttttatggttagatttcataaaatctcctaaaccaaacctgagtaaatttctgctctctttacttgctattactttcaggtctataaagatataaagaaaattacacttaatcgaattttatatattttaggtattttgaaggcaattagttcatcataatacctcaattgagatataaattatgcatttataagactgagattgccaaataaaaattaagatgcttagcaaataatgaatttgattaaatttttaaaattttctcaaaactacaaaaaagtttttgatcaataccaaagattataattgaaatatctttccatctcagatattaaagttacaataattccaaaattatgggcatgcattctccctccataagtgaaagctgtacaatgcctcaattctcagttgtctcttaaacaattccattcagaaatcttcttcagctgctaacatattcctcattaagattcctacttctcataaacatttctccaaagaagacataaaaatggccaataggaatatgcaaagatggtcaagatcactaatcatcagaaatatgcaatgaaaaccgcaaggatatatcaattcacacctgctaggatggctgttaccaaacaaacaacaacaaaagaaaaacaagtacagggaacactggaaaaactggaacccttatgcactgttggtgggaaatgcaacagctctggaagcagtatggaggttccacccaaattataaaaagaactaccatttcttggagcaatcccattttcaggtattatccaaaataaattttggtttttggtatttcaaaataactgaaatcaggatctcaaagaagtatttgtattcccatgttcactgcagcactattcwcaatagccaagatatggaatcaacctaagtgtccatcaatagatgaaaggataaggaaaacgtagtacatttacatactctagaatattattcagcttctaaaaagaagggaatcctggcatatggatggggaaaaaggggaatcctgccagcatagataaacctggaaaacactgtgctacatgaaataggccagtcacagaagcgcaaatactgcatacattctacttatatgaagtatctaaaatagtttaattcataaaggcaaaaagggaatggtggtggtcaggggcttgggagagggaaaaatgagaagttgctgtccaactggtataaagtttcagttaagcaagataataattcttaaaattcatgtaagagaaaatattatcaaaatagaatgcctcatttaacctgctttatgagtgttcactcacatagatcattatatataaaaagtgtcactgtaactaaataatttctacaatttcattaacatgtactcaactccctttgctgcatgtctctatcatagctgttcctgcgaggtactgtaacccaccattcattcatccatgtacttcttacacttcaaaagactgaactatttcttttgtagcacttggcatgagcaaatacataatatattaataaataaaaataaatataggaaaattcagctcacaaatgtgctatttgtgcatgaaaaggaaaaatatttttaactattttcagaaataagttagaggctagaaagtaatcttatggtatattaataatttaaaagtcatcatcaaatcctgtggtttggccaaaataaatgcagaagtagaaagaaagagagccataaattgcttaaggtcagaaatgcaagctgaaaacatagtgtacataatacaagaaattcttaattctccagatttctatgtgtcaaaaggctcctgatttcagtgtggaaatgagggttttaactacatacctgaatcacctgtttggaaaataggtacgtatagtagatatataatatataagaatacatatgagaataaagtattataaagcagcataaccacccacatttcaccatcttttcatcattaaactaaaaaatatttttacaaaaccacatgacctctcagtcataatagaactaatgaaactacaaagatccaatcttactcagagaacttgtacgatttttgaaaacagcaccattaaaacagctctctcagagtattctcctataagctcttaaaagttattttgaaaactgtcaatacagctggggttcttttccacccagtggcaggttacaaaggaatattaaagatgtttcaaaaactgatataattcaggaaaaataatttaaacaatatgactgcaattatgacatattacaatgaaatacatggcagctagaactaaataggagcccacagaatgatacttagaaatgcatttacatggttactgagttttccccagtagaaaagcaactatcccttcttgctccttattggtacaaaaattatttcagggcccacaaattctaaaagcattacaaagtttgaagaatataaagtaaatggcaattataaaaagtaagggtttatattttacaagccccaatacagcaaggcttagaattagttataaaaactagaggtgtgttacgtcttagagtaggtaacagctggatactgtgtagaataaatgctcatgcccatgggtgggatgttcataatgctgaagggcaagagagagagatgtatagcttgagaagtgatgtggataattgcttgtcattaaacagcagagtaattgctgcagcaaattcccatgtaactattccacatgaaacttcaacgtgcccttggacttactaaacatacatagttttctcagataaaaagacagcagtcaatgatgcaccacacttaaaaagatcattattttattatttagtctcacaaaaaaacattgggaccctaaccattaataacacagagaaaaaaaaagccattgatttttacattagtaagaccttggtaagatctcagaatctactttttcctaacctgctcagactaggtgtctcataaagcctacaataatttaaaagatcgtcacatcttttgaaaagctttcatgtacaatcatgttattcagtattcaaattcataataagccaagatacgaaacatttaagttgctgcaggatgttgagcgctattaagaatgcattaatagagaggattctaggcagctgaagctgtggcagaggtataaatttgaaagtaccaaaatatcctgaaaagaaacagaaacaggaagaggaaaaaaaagagaaggagaagaattaaaactacacaccctatctcaacataactagaaaacaaggaaactccaaacttcaaagtacttgtaaatataaatataaacatcaagacctacctacctctctcatgtgctcctgccagtagccttcatggagaccaagagcagttcaggagaaactacacaaacgagagcagagaggagttaagggcaggttgaaccatgatttaaaaccactgctagaaacagaaagaaactcagcccttggccctatatatactgaaaagtgaacagttagctcagaacactgataacagaaaggagacttgaaaacgcacatgggacatgacaagccaccttgcaaaggcgtcactttggagagaaaagacagctaaaacaacaggagaggtttctttggaaactatacattagagagagaaaaaggggagaacatttcgaattacataaaacaaaagaaaatttaaaaattggaaggcatatgccatttgaaaaccatgccatccagtaaagaaacaatactttgcttacaataacaggagagggtgctcttgaactagaaatgttaagccatcccaacatacagataaacaaaaacctagcataaaaagaaaattgaaaataaggacccaaacaattaaggtgataaaaaattccaccctctcacacaaacaaatggcaagacactggcaagaacagtggcaaaacagaagaaaaccataacactcaaaactaataaatatccataaattctgcaattaggtagatttaaaaaacaaccttgaaataagaattaaaaactaagtagagaaatgaatgaccagaaaattttaaaaggaaaaaataaaacaccaattgattgaacacagaaagaaaagagaagaaaaatacaaaatcacatcagaaatggaacgtaaattacaagatgcccaaggaaaaacagatttgaaagaaaatgcaataagagacactggaaaaatagtagaaaatcaactaaatgaataaaatgaaatagagaaaaaagtaaaaagggtcaaagagaaagtggctgaaatggaagacaggaaaaagaagatacaatttatatataaatggaatttctgaagaagactttttaaaataaaatatgactaataatgaaattctaaccaagaaagtattcaaacacaaacaaccacaacttatatactgaaagggcccactagccacggggtggggggaaaaaaaaaacttgtaacaatcaactcagagacatattttagtaaaagtagtagacattcaagataaaggaaaaatcctcagggaatccaggcaaatgaattcaaacaacatacacaagtaaaagaattagactggcaatagatttatcaaaaataagattcatatccaacaagaggttagtatacaaaatgtacataaagctcaaatgactcaatagcaagaaaaccaaaaatccaatttaaaaatggtcaagatatctgaataaaaatttctcaaaagaagacatacaaatgtccagcagacatatgaaaaaatgttcaacatcgctaatcattagagaaatgcaaattaaagaccacaatgagatatcatcttacacttatcagaatggctattatcaaaaagacaaaagttaacaaatattgacaaggatgtggagaaaagggaatccttgtatactgttggtgcgaatatatattagtatatcgatyatgaaaaactgtatggaagttcctcaaaaaactaaaaatagaattagcatatgacccagcaatcccacttctgggtgtttacctaaaagatttgaaatcagtttgttgaagaaatgtctgcattccatgtttattgcagcactattcaccatcgctaagttatggaatcaacctaagtgcccatcaatggatgaatggataaacaaaatgtggtaaatatacacagtgaaattctattcagcccttaaaaagaaggattctgtcatttgtagcagcatgtgtgaaaatggagaacattatgctaagtgaaataaataaggcaaacaaagacaaatatcacgttctcacttatatgtgaaatctacaataacctaactcatagaagcagagagtaggatggtggttaaagcagttcaggcagtaaggaatggggaaatgataaccaaagggtataaaatctcaggagaaatatgctttttttagttctattgcacagcatgatgattatagtcaataatagagtactgcacatcttaaaattgctaagagagtaacattcaaatgttctcaccacaaaaaaaggtatttgaggtattgaatatgttgttaactaacttgatttaattattccacattgtattcatggatcatacatcactttatactccataaatttatacaattataaattatcaatttacaatttttaaaaagattcaaagcaagataccaatggggcagcatttccataaggctccaggaaataaagggaaatccaaggatttgtatatagccaagctgccttcgagtatccaagctataaaaaaagtttttaacatgcaagaattcaaggaattctgkatccatgagttcttaaggaatctactagaagatgaccttaacccaacttgttattaactgggaaagttaagcaaaaaaactaatagtatacatatatatatttatttgtaggtataagacacacgggaaaatacatcatgtgctatatgctatatattatgtgctgttttctcaaagtagaaataatgccacaaaaacaataagacaaaaaggctgttttataggcatgaggcaggaactaaagaatatcaataacagccgaataaccagatgttaaaaggtcataatgtttaaatggggaataaggacgttagtaaagaaataagtataaacacatcatctagaccaaaataaaaccttcctagaaaaaaaaacttcaaaaatcgaatagtaaaaaaggttactagagaaagaagccaagcaaatataatatagcgtgcataatatttataatatgacaaaattaaaatcaaaacatcagtcttttcaataattgtgcaggcacttaacctaccaactgaaagaaaatcatataaaatcaaatgcaagccaaaaagcattaaatgtaacaaagaaggacacgttttaacgctaaagccaaaatcacaataaagacatattaaatataaatatctatgtaccaaataatatagtacctttttgtaaaacaaaaactataagagatgccagaagtcccaaaaagaacactaataataggagattttaacatactacttagaacaaggcagatcaataaacatgtaaaatgaaaatttaaaaacacctacaatataactaataaggtagattttatgaatatatgtcaaactttacaccctaaaaataaacttttctctcaaatgcatgtggagcatcacaaaaactgatcatatattaggtgataaggaaaatatcagtatgttctataaaatagtaatgctataagaaatattttctaaccaaaattaaaataaaactagaaattatttaagcactttttaaaaaaggctccttgcgatggttaatactgtcaacttgattggattaaatgaaatcagtctactactccacaatggaggtaagggatatctggaatacaggagatcccttagggtgtctcttagtattaccatgccctctgattaaggtcaatgggaaactacaacagcccaatccagtcagggctacaaatagcccagaccctccaggaatgaaggtttgtgtcactccaccaggaaaaaaacaagacctgctgaggtgcttgctgaaggcaaagggaatacagaatgggtagtagaagaaggtagtcatcaataccagcacgtgaccagttgcacaaacaaggactgtaattgtaatgagtatttcctccttcttttgttaagaacatgtttgtgcatgtatatatttgtacaagaaaatatcttcattttatttcctttttcctttaaatgtgacataagattcattgacttgctatcagcatttaagtgttgttaaccttacataatagcatttgggttggggatttgtgcattcctggttgtacgaaggatagttttattatgttaggcataattatgatattattgtctttatttgaagactatgatttcaggaaatgtatatgggttcaagttgacaaggggtcgacttgtgatggtaaatattgagtggattgtaatattgattggattgaaggatgcaaagctccctaggtgtgtctgtgagggtgctaccaaaggagattaacatttgagagacaaaggagagacagacccaccctcaatcttagtgggcaccatctaattaatcagckgacagtgtagccagaataaaagcaggcagaacatgaaaagactagactggcatagtctcccagcctacatctttctcccgtgctgggtccttcctgcccttgaacattggactccaagttcttcacctttgtaattcggactggcttccttgctccgcagcttgcagatggcctattgtgggacctcaccttgtgatcatgtgagtcaatacaccttaataaactccgctttatatacacatctaacttattagttctctccctctagaaaaccctgatacactcttcaacctgtatatcttcttytagaaaaaaaccttttcttaaacaactcttaggtgaaggggtaaatacaagctaaaagtagaaaatatattttaaacaattataagcacactacatatcaaaaatttttatttttattgatgtaaaatatacatatgtaatttatcatctataccatttttaagtgtataatttggtggtaataaatacatattatatatatatatatttccccccttcatctcctcctcccctcttccacttcccagcctctggtaactacaaatctactctctgtgttcttgacagtcacttttttagctcccacatgaatgtgaacatgttatatttgcctttctgtgcttggcttatttcacttaacaaaacggccttctgtttcatccacgttgctgtacatgataggatttcattcttttttatggcagaataatattccactgggtatatataccacattttctttatgcatgcatcagttgattggcacttaggttgatcaagtatttttaaagcaatggtcagagaaaaattcatagccttaacatttctatcaatgaaattttaaaaataaaaaagaattaaattcccagctcataaaggcattcagggtaataagctaatttgtataacatggcatttcatacatgcatgactaaagaaacagtccccaggtatgctctaggttctcatccttttttcaacttggtcctggcagtgcaaaagacttccagggaatttagctccctagaagttgatggcactgattgcccaagtatgtaagataataccagactactaaaattattgttttttaaaccttcacttgtatttcttccatttccctcacttttcctaacgtctctcagtacacagaaaaaaacaagagaaaggttgattcggggtaatatcagtcaggtaacgatggaattcagaaatttgagacacatctcttctttcttgaggcatatcactcttatactgttaatcattccacagagagctctaacaagaagctttcattggtctttgaatctgtagcaggagcagtttataggccaagtcccataagctcagctgagattcacacttaccgatgctcttctggaatctaaaccttaacactggcataagaagcagaggagacagaaaaagagacctaaaaaaacttttctttatagaaaagatacaaactagagctaggtttcagcctccctcaccttctctttggaacagatcttacatatttaaaaccatatttgatgaaatggatgcatccctttaaatagtaacagatatgaggatgactaccaaatatctctctgttattataagcctggagagtcccaaaaaagtcagccagacaacatgaaatgtaaaatgtctaaagagtggaaatataacaaagctaaatggcaaatggacagggaggaaatatctacagcacaaagatgaaaggttaatattatatagaacaactcaaaataaaaataggtaaaagttatcaacgtgaaatttacaggtgaaataaacatgagaacatgaagatatctccaagatcactaataacttaagaaatacgagaaagtttattaaaatgctgtttatagcagcagtaagtagaaacagcctaaatgtccatcagtaagaaaattactaaaaagactaggaaatacacatatcaaagaacacaacaggacactttaaaagaatgagtttgagctacataaacaacatggaaagttctctaacatttattgtgacatgatgacatttattgtaaatcgtttaaaggtgtgtaatatgcacaagtttgatccttcttataaaacagcaggaaagtatatatttctacatgtatgtatataatttcatggaaatacacaggaataaagttatctgggatgatatacatcaaatgaataataattacctatggggtaggaattgctcttggctaaaaagggtaagaacgttcttgtactttgtacatcaatagatacttacttgatgtttaaattgttttgtcaaaaaaatggtttcaagtatacttaatttcatcttaagtttttgttgttgtttgagamgggatctcactgtgtcatccaggctggagggcagaggcacaatgttggctcactgcagcctcaaactcccaggaagaaatcctcctgcctcagccccccaactagctgagactacaggtgtgtgccgccaggcygsctattttttttttttttaagttttttgtagagacagggtcccactatgttgcccaggctggtcttgaactcctgagctcaagcaacccacccacctcagcctcccaaagtgctgggattacaggtgtgagccaccacaccaggccttattttaaagtgaatggaagataaagaaataaaaatattatgtgtttaaaatgttttagatacttttagttatgatgacacttctcaacctaacttgtagtctcaaccatatttttatatgttttatctatctttgatttggggtggatctctcaatactatctttcagcttaaaaattatctctaacagtaaattttctagagtttatcttgtctacagtagtgttttaatttcaattacatttttcaattccacagtttctaataagttctctttcatattcatgcattcatgtttcattctgcctattttgttatataatttcttgctctttctcaatgaaagttctctcttcaattatcttcataataaagcacacttattttatagtattgatcagatctttctgctaaattaattttacccaaaatgaattcatgtttacattattgattaatcaagttgcctttctcagaagtagacttttttttttttttagaattttggtactcagtcttatttatactgaataaggtaaagtggcttaacagaaactagtcttgataaggtaaaccaaataagtgaaaatagtgccaaacacagattcataagcatcatatatatttaatgtcaattgttccaatcttttctcaactccaactttaaattttaatcaagttaatgaaaagcaagcctacattgttattatttaagtctgaatattcggccttcagaaattctgcaaaactttcttggttcagtaagatttctatattaagataaaaaatctatctaatgcaacgaacatccacagctgtcagctaaatgaaatgtctgggttttctttttttaaaaaaagcagagaattataaaaagtaatacactaaatagtttattttaacttagaaacacaaatagatattgatttgcctrtcttttaaagttatttgaagatataaaaattatttaagaatagccaataatagaaattatgccataatcaccccattaattactttttttctatcttccatggctcccagcacatattttgcagtatctaactgaaggtattaattaagttatttggatggaaggatggatggatggatggatggatggatggatggatggatggatggatgaaatggaccaatgaatgggcagatggatggacagttgaatgggcaggtaggctgacaaataaaagaatcaaccattcagcaagatgagccaagtctgacctcaaattagttaaacctagagtgtcttagttacccaaggtaaacmgagaaactaagtaccatacatgggcagatgtatggacagttgaatgggcaggtaggctgacaaataaatgaatcaaccattcagcaaggtgaaccaagtctgacctcaaattagttaaacctagagtgtcttagttacccaaggcaaacagaaaaactaagtaccatacattcaggattagattttccttcttttccatcaacattagcagaagcaaaaccagcaacagcatcaacaaacattcactaaaaatctgtcatgtgaaggcctctatgaggtttaccagagatacaaagaaataaaaaggactgcctctgcacataatccagttggagagttaaaacacacataaaaggatagattacgattcagggcaacttgtgaaaggtggcaagtaggtgagacagagaacagagtgagacaaaggaagaaggcaagggcagaagcacagtgaaagcacttcatggaggaggcaggacctcaactatggtagagaagagaaagttctgcagtcaaatgcacagtggcagagatgataactgtagggcaaagatgagatcagtttaacagaggagagtgtttgtaggaaagatgtgtagaagttatgtgtgattaaagaatagaagcaaactgtgaaggaaagaaatgctattgctattttttttctccttagcacgttcctccccccctttttttgctatgaatctcaatattttagataagaacattaaagttcaaccatctacccccacccctgtcattctagttacagtaaattgttattgcataaatggggactaggtattctcaataataaactacattggtaaaaataattaatggatatgccataaatcaaacaatcatatataataagtacacttaatagtacaagtttatgaaaaataaattgctttacctacttgggagttagtttaggatcttatagcacaaaaagcacacatgaaggaaataaaaattgttgatccttatctagcatcatttagccagacactgtagtatatgcctctgattatcatttcactaacacttactatatactctgtgaggtattattgtcttgtgaataaagaaatctaggtttgtaatttttatccattaatgagaaagaactagcaatagaaagaattagcaggaattccacattcttgtccctttgccccaatattgcatgcatgtgcacatgcttaagatttgcagttggcaacaagcttcaccaaaaataaattctgtcaatacaactatttatcctgagtctcaagaatattgtcccaggagtcaataactaccttttttcttgatcccagtacactacaagtgagctcctctggattttatttgtacaaacgattcttccttcaaactaaattactgtaaaaacacttaccacaaaggaaattgctaacaaaatcattatctacctcagtacaaactaatgttattactttcaggaaacagaagcaactgaattatataatagaaatattagtttaaaaggtcactggatgtcagaatgtatcattttgcagaagcctcttgagactattcatcagaaattataatgcttagaacatcaaattcaatgccatgattcagcagatctctctcctccctggttcatttagcaccagccatgaagctaagtaaagggaagatagttattctctctgaaaagagagagtatttctctctgaaataattccttccacttgcaattaagaagaattaaaaaaaaagagaggcccatgtaagttgttctttattaatatacacctaataccctacataaatatatagaacatacaccttgacattagctctaggaagaaccagcttagccctacaccgcattttacagatgaagcaactaagacacagtgaagtaaagagtttaaccaatcaaaattgcagaaatagtgactgaaaaaactggaagtaaggaggagtaattaaacaaactacaccactcctctcaactagataaaaactattcagtacaattgaacatgaaacaaagatacaaaagctagtaatgttttcagtcctctatctcattcaaagacttcaactcaactttttattctgtacctatacttgcatagtaaaagaattttggtgaaaattgactagttagccttctgtaatatatcaaaataccttccaaacaccatactgaaaggaactgaggctaaaatagcattcaaaagccatatcaaataaggatgctatgttccaaaacacatggtttaagaactgcacatagccccccagagtgctagttgggattctcaggcaaattatagttgtcaaagaaatatcaattctttgtagatcactgatactaccattctatatacagaatactctagaaacaattcactgtaacatattaaacataatcaagaaactctagtacatgtggaaaaaatagaaaaaaaaagttattgggtatcaaatgaactgaaatccgaaagttcctttttcctgacttcaagttttgtagcatacacagtgcaaaaagaatcattattattgggcaacaaatatatctatagtaattcaatatgatccctgaatatttgacattttttgttctgttacagacttctttgtacttcaaagagatgacagcctgataatacatccattcaactttttcctatgtcaaaggaaaagctgggataaacagaaaaatataaaagatgttattctagttgttcttaaaaaacaaagtaattatatcctatttagattctttaagaattaagactgtgtatgttttcagccaatatgatccctatttcctcaaaacacatctctaatgtccaccatactttcaaatatagaacataatagaaccactttggagaattctttagctgtatctcctagggcagaacatgtatgtacatatcctaggtcccaggaagtccactcctagatttataccaaagagaaattcacaaatgtacaggaaagttcaagcatttgtaatagccaaaaactggaaacaacccaaatgtctattaacaagaggatggaaacataaatcatagaacagtcttacaaaggaatactacatagcaaaaaaacattgaacttctgttataaatagcaggaatgaacctcacctgcacaatggtcagtgaaagaagtcaggcacaaaagagtacttactataagtacgcttttgattaatacacacttctggcaaatctaacctatggagacaaaagtcatctgggtaaagacaggaaggtcacatgagggaggaaatgttctttatcgatattgatcagtgtgataattacatggaccaatactctggaaaagttcatcaagctgtactttcaagatgtgtgcacatttctgtttgtatgatatacttcaatttttaattttcaccaaaaatattaagtatatgttagaatttttcaaagattacattctgcagcaatgaattcagcagagcaatattgagaataattggattctagtaataattcgtctactaatcagctgtgtaatcaatctttaatacaacctaacctctcagtgataattctggtagccaatacatcacacagaaaagttctcaagatattaaatcaattttattcatttaacaaatatttactatgagccactgttctaggcacctgtctcttgcattctaatggagggaaacagaaaatactcagcaaacataatgaatgaatatatgaataaatgatgtaaactgcaatcaatgtttaaaaaaacatagttacatacatatgaatttgtacgtgtatatatacaccaaatgagactttcaatccagtcttaacacacctaaacatatataaatacagaaaggaaactggcttgaaataactatttcattatgatctaaattaaaaccattcccatggtaaatgctcctgcataaatctttataaataattagccttgataacatatgaaatatttaaacatatccttgaaaccacagaggatagagctagaaccaaaaaggcagatttttcaaaggaagaaattagttcaatattgctatggtctgaacgtgtcttccaaaaagcaagttttagaaacttaatcccaatgcaacagggttgaaaggtgaggcctaatgggaggtgtttaggtcatgcaggctccacctttatgcggagattcacactaattacaaaagagtttgaggctgtgtgtttgatctctcaccctcttttgacttctttttgctcttccaccacaagatgaaacagcaagatggccctcaccagatgccagctgctcaatcttagacttcccagactctagaaccatragccaataaatttctattcattataaattacccagtctcaggtaggctgttatagcggcacaaaacaggccaagacaggtatttaagaaagaactttaagtaaccaaaatattttaaaagacaatattaaaagagagatttgatactggattgtagaggagaaataacttttgtatttgggaggaaggttagatttgacttatagaaaacttccagaacttaaatttgtcaattgggagttttcaatatatactaaaatattatatttttataaaatcttttttgcatatatacaaaatacaaagaayaaaggttggctgggcacagtggctcacgcctgtaatcccarcaccttgggaggccgaggtgagcagatcaagaggtcaggagatcgagaccatcctggycaacatggtgaaaccctgtctctactaaaaatacaaaaattagctgggcgtggtggcacgtgcctgtaatcccagctactcaggargctgaggtaggagaatcccttgaaccagggagttggaggttgcagtgagccgagatctcaacactgcactccagtctggcgacagagtgagactccatctcaaaaaaaaagaataaaggtcatatacaattttacactggtaataaactgacatttgaatttctctgtattatcttattgatcttaaaaatgctattataattacgcaaatataattatatataattttctgttcattattcaacgagcattgtctagaagtattttaaatatgtcaactttcactgtaattctagctagcttaaaatttttgtagtagtaagtattcactctttcaaagatacacgaatctctaaaaagttatatgatttctttaaaatttaacacccttctaacataaaagttatgcaaaaccccagcaaactaccaaaacaaaccatgtatatgctaaactcaaattgcctaaaaatttaaataacagaataaagtagcaataagattcagtgaggacctgtttataccactccctggtagtttcaaacagtctcattgattaaacctaaccaagctgaaaatccttgcaactacctattatgcatactagacttttgcagaatattatcaacaaatatttattgagtggttgtatccctttccaatctattattcacactacaattacaaggatctttgttaaatgttaattgtatcaagtcatgcctcttctaaaaatcataaatggccccctgtctaccacaacattatatctaagttcttaaaatggctcttggagtattataacatgccctgctcacttctgtgacttttcctttctctagtctctctgaactaaactcttcaactacagggatccaacttcaactcctcttctgagcttttcagattctggctctaatcacaagctatcacctctgcctaccacactatatcctgtcctttctaacttccactcggccttcactattcagctgagacatgacattcacccagaatcctttcctggctccckgcgcacccagtgcttcrctccttcagcaaccacatagtgtgtaatgtcccgtcttctccactatcagcaagagagggaccatttctctgtgtccctgctctatatacaatggcacttagtaaactcagtatctttttaatacatgagtgaaagatatcaatgccagccccatgctgagtccttgagacataacatagaataaaaatgtatttcctgcacagagaatttgatggtctaggtgttcatttacatttgaaaaggcagggtgaaacagaaagtaaccttgtgatcaccataaactcttcaagctttattttcctcttctgtaaagtgaggaaccttcaccaccccattttgtggtacaaccatcatttactgatcaaaacagaaaactgatcgtggtcattgtttcttctctctccctgaaaygctatttcccatacaacccaaaaagtctcggtatgaacctgcaaagggatattttgaatctgaccacttatctccattttttctatactcacagtaatccacttcccctctcttagacctctaaatgcattatttccattcttgccccatccaatttattttaatatagagctgtcaaactataaatagaagtcactttacttaaaatctctctcaatgacttcctaccatcctattaatgatctgatttctactgacctctccaaacatacctccaccagctttgtcctagtaaagctccagccacatggcctcctccagatcttgcaacatgccaagttttttccacctcagaacctttatacatgctgttcattctggctagcacattcttcccttcactttgtgtatgcctgcttccttttcttccttcagtttcaatgtaatacctcttgaaatagactttccttggacaccatatctaaactgaactctcaatctgtattcctgtttttctctattacccattcactgatctttccttctttgttcttcagcatattcccaatagatagagccatgtctggcatacagtagaaagactaaaaatgatttaggaaggaagcaaaaaggcagggaagctgtctataggtgtaatatatgcagactattttgatgtgaacacaaggttcttattttctctaaatttcaccttcaacagcctaacacccatcagtagagatggataaatgccttctgttttgaacactaccgttcatacataagttacctgagattaagtcatgtattaacatgtatcaatatagctgagtttttaaaagtagatcgctgttaccttaggaaggacaaacaggagaatggaggaaaagaagataaaacactggagaattttaataagagagaacaagtcgacaaagttctgaaaatgaagtggcacctaaaggcaccaggaagaggccacagtgataaatctctggaggagaatatgaggcaaaacaacatttaagtcccagaaacccagggactcaactcgggtataacagtagtaaaactgacagggcagaggtagtagtaaagataaaccctgagtaactcacatacagttttccttagagttttattgaacagatttattaagaatgaaaactggaaatttcatataatatcacataaaacattatccacattttaagattcaataaattcctttatcactcctgggcaaatctaatattactaaatgtgtaatattactaatttgaggtcaagtaaaaattccaagtagacagatttttacatcaaactattttagttgtgcttcattagaaagctcaacatgatcaggttcatttcctcttggtcacctgaggcacaatttgctacccaccactctgcaataagcagctgtttgcaataagccctatgttgcacacattggactgtctcctggggtttacaggatgttgattcctaaaggccagatttaacactttggggaaatataaaagacagcatgcaaatacagaagaagaaataatgtatggtatttgattatttgaggactgcaacatattacaggaattggttaccacagaaactgtgatctgtaaatggtccaggtggaatatgcttgaaaataacatgatatgcaaaaactgagttgactcatagaacatcagaggaggctagtgcaatggagattatctagtgggattctggctagtggctaacaagtctagctctgtattcaaagtactaatgtcccatttgacaatcctgactggtgaacatcaggcctccaccaaaatagctgctatactgtccaggtcattttaaggcagctctgttatggaattcttcatattgagtgaaaaacctacctaaactctttaatatacacccatgtggctatgctccttagagccaagagaataaactgaattcatcttccacatctccacaaatacttggaagcagctattgcatatcctcttgcctcagttttcttgtcttcagattaaatagctatagcttattcaatttcaaccattactgcaagacataacattgggttatttcaattacctaaccactctcttctaaatatgttgtcattgctatatttcaatgatcaaagacaaatacactaagtcaacgataagaaccatcatatgtagtaagtgctttgtatgtcttatttcagtaaagcctaatatggaagacattataatcaccaacttataaatgaagatactgaggattacagaaatagaaatacttgctagaggctatattgggagtaacaaagtcaggaattgaacccatgttgactccactatgccctaacccttgtcctgggctatttcaggagagacctaagcagagcagaggagagaagggggtaagagacactactgagcatctgttagatccagaatctgttattcaatatgtaagctgactcatatattcaaactatctatgcaatcaacataccaactacatttttctccaagtagtttggatggagccttccaaatgatccaggaaaaagtgtgaacttacctcacacttacaggcccactgagttttttaagtgataaaatttatactttcactatggtattttaaaagatccctctggaagtatacatggacagataaacagaaagccacactagagactgagagcttatagctctgaggtgagccaagacaagaagctgactagattacaggtgtgtagatggaacaatatttatgaattcaagagagatttttaaaagcagaactgacagtacttggtgatgctttagatttgtaagctgtggtatagcagtgacttagaatgtggctctggtcagactctgggctttaaattccagctacaccactttaatttgtgtgaatgaagctatactttggtttctgtaactgtgacataggcacaagagcacctaactcatagagatgctggcaaaattaactgtgataatagatggcagagggtttaaaaagtctctgtctcataagaaatgttcactaatcactaatgtgattgataaggagaagaaggaaaaaaaagaagagaggtgggaaaaggcagtctagaacgactgccaagtctctgcttaggtgaatgaataaactcagagagaacagaggcagaaaggctggcttgaggaagaagaattttgttctgaatgtgatgggcttgaggtatgtgacaggcatacagatagcaatagattgaagaatatggagtgtcagcagggtagtctagccttttaaagaagcttggttaagaaggaaagcagagaggatgtaagggccagaggagggaagtgacttatttttatgggtacacaagcaagttagagtttgaaagagaaatgccagaagacagggaggggttgaaggtaaaaacgattaagaagtggacgaaaccagtctccaagggacaaggtcaggaattaaactcatgttttgctccaaagcccctaccctaactcctgacctgactacttgagcagaaaccaagccagggcagaagagagaatggataaccagagaaacaggctaagagcacaagaataagcttcaagcaggactaagaggaacagtaggaaagagggaaggatggctacagagaggaagcctctctccggtgttcatatttcccaatcacctgagatcagctccaaggaggttggggagtagagggttgggcttgagtatgattatcagatttagaatatatgaaaaaaacaggagagaaagggacaaaagaaaagccattcctgcaatgagcttctactcaatctttcaaggcccaattccattgtgtgtcatctgtgacatagttccccacctttcctctttcataaatgaaatttatctctcacagaaaattttattttaaaaagttctatcaagactggattaagaaaatgtggcacatatacaccatggaatactatgcagccataaaaaaaaggatgagttcatgtcctttgtagggacatggatgcagctggaaaccatcactctgagcaaactatcgcaaggacagaaaaccaaatactgcatgttctcactcataggtgggaactgaacaatgagaacacttggacacagggtggggaacatcacacactggagcctgtcgtggggtggggggaggggggagggatagcattaggagatagacctaatgtaaatgatgagttgatgggtgcagcacaccaacatggcacatgtatacatacgtaacaaacctgcacattgtgcacatgtaccctagaacttaaagtataataaaaaaaaagttctatcaaagtatttatgaagatgaaatacttctaaagtgcttatataaaatctttatatgagaagattttatcttcataaatacgtctctccaactaggtcacattttgtttaatgctaaattctcatccactccctaaaacacagtagatgttcatgttttcttaaaaagactgagccagttttcggtccatctaactatactctaatacacttccttctccatttcagtatgttakaaaccaaatgatgcagtttttgagaataacaaataaagaaaacctgcaaaattgtcctaatagcaaacagttaacatgagtctgccctacgaataagatcattgcttccaaacgtttttaaaatacycccaatggtattattagtatcatttatagaactagacttgtgtgatagtctttagaaactgttaagatagcattaaaatatatctcataggtccctcgatgctctcctggtacaaaatgaacctgtgccatttacatattagctgactctgacatccaagggttctggtatctgaaagcaatgaatatgacttcttctgtccatcttatgtgtatctcataagctcctaaggactttcctggaaagattttagactagcaaagaaatattttcttcatcaaaaatcctttcaagtatttatttccttcccaagtagactgagttctgtgtgtactggttaatactttataagcttcagcttgcatgcagaacacatcagaggctgttttatttccagacatagttttcctgaaattttaattgtttgccatgaggaaaaaaatgatttcagagctcaaactacattacctacgaggagtctcccagagctctaattaccagaatcagaacataggattgctacttcaattccatttttcactaaaatattggcaaaataacaaattaaataaaattatggctaatgttaataacaataaattatttaacaaatatgaaggagcacctatgttgagcagctgctatgttaggcattgggatggtaaccaaaatgcatgaaacattgtttccactcccccaagaattttacaggcaagtgkgatgcaatatacctcactatggaaaaaaaagtgagacagcaaaaaatagttttaaatttttgagcaaagtttaaccaaatgcaacccagttaatttacatcaggtgcctttctctttaaatttcaaatgataaaagtcagcttctccctctaaacttcaataaggcaaataaatatttcttggctttcatgaagccctaggagccttaactatgcaacagttcattcactaagaatgcctgtagaggaagaagggtagtcaggtggtaccagcaaggggagtagaatgaagtccctgctttaaagagagacaagagctagataaaacagccactgaaagaaaggaaaggaaggggaggccaaagaaaatacatggcttctcttagtagggccaaatcatgaggcccaatccagccttctagcttgacttcctctcctattgtctctcaggagccctctccctgttctagtcaaaataaatgtctcttctctgatgtagaataagagtccccgacccacacccaatatcatggctctcatctactgcatgtgagctcattactttatttatcaaaacaaagatggtccttttttttttttttgagacggagtttagctcttattgcctagactggagtgcagtggtgcgatctcagctcactgcaacctccatcttctgctttcaagggattctcctgcctcaccctcccaagtagctkggattacacgtgcacgccaccatgccaggctaatttttgtatttttagtagagagggggtttcaccatgttggccaggctggtctcgaaatcctgacctcgtgatccacctgcctcagcctcccaaagtgctgggattataggcgtgagccaccacacctggcccagatgttcccttcttaaaaggaatcctgatgttaactattaaaataataaactatattacatatcatcaagcttgcatatatacatatatatatatatatatagttggacttatctttattttttaaatattagtgtatattattataaattgttaggctatgaactcattgaacagggccatcttagtgtccccagatcctaaagcagtacacagtaggtgttcaacacactgtaatgttacaatattccttcctcagataggggggtctaggcatataataattatctgcattttatatgatcattctkcataaataatcatagccacaatagcagcttttatctgaagtcgtgtattgattcagagaaggtttcagcttgacctcaccatagaatatcaacttttcacttcctttctatagagtattttatactataggaaaagagactctaacacctcttccaaaaataatccataacatttaatagtttattcatagtcaccatgaggactttgacctctcatcttttgtatctatttttaattgtgttagaggccacattaccctaatttccttacaaagtttccacttagaccaaaaccgtgaatactgtaattgttggggatgatgaattagatgaaaaatagactatgcattttcaatcattgcatttagtattattagggtagatggccaactattacacagtaagagatgaaagtacaatgcaaattgatgaagaaatcataatcttaaaattttcaacaacaggctggtattgattttgatgtgaaagtaaaaagcttacttaatacattttttgctcaattcgctattgcgtgtacactgggaaaaatatcttgcattctataccaacccattaaatcaaaatgaatgaggggagcatttttattttatttatttatttatttatttttgagacggagtcttgctctgtcacccaggctggagtgcagtggcgcaatctctgctcaccgcaacctccgcctcctgggttcaagcgattctcctgcctcagcctctcgagtagctgagattacagacgcgtgccaccacgcccagctaatttttgtatttttagtagagacggggtttcaccatgttgaccaggctggtcttgaactcctgacctcgtgatctgcccacctcagcctcccaaagttctgggattacaggtgtgagccaccgcacccggcccatcttttttacttacactgcactgtgtaactcccaattcctgatgatagccagctacaggagcaattcatcaccaacatcattttatcatcaagttctttcatatctgataaaacctattcctttctgacatatgtaaatttcaaatgagtgctacagataaaaattgttaaataagtggctataatgtgattccaaaaacaaaaggcacccactcactgtactttrttatctaattacatgatcattctgttaaacttcaagcaatgtatttgaaataagaaagtgcagacatattgtccatctcaatttcataaatgttgtatcatatatccaatgcatatcactttaaattttttcaacctgcatatttcaagacagctgctacacagtactttaatttttcctgtttgatatattaacatgcagctgaatctgatttggttacaacttctcagtgaaaaagatgttcatctacttaaacatcagtttcaacagaatggcacttgacagagaatatttcctttttctgtactactttttccagttgcattttatatcagtatgcttcccattaacacaacaaatatatacataaaaccaagacatatgtgtaaaaggtataaatgcagtcaattagccagatgtttggaatcatggacacaaacatcagaagcattataaaacctacaggaatggtaatgcttgacaggatatgggagaagtattttttaagaaaaccttataaacatagtacaaagatgacaaagacacaattatagcccactgcagccctgaactcctgggttcaagcaatcccctggcttagcctcccaagtagctgggtaatgcaggtacatgccaccatgcacaactaactttttttttttttttttttttgatagagatggggtatcactgtgttgaccaggctgatctaaaactcctggccttgagtaatcattgtgcctcaaccttctaaagtactgagattataggcatgagccactgtgcctggtcatactgttttctgcaatagaacttacctcctctctctcatgcttctgtagcaccaagtatcagaaaacataatctagtcatttctagataagcttacatcattctgattttcctcagtaatttctgcatatgctcatcttaagaattcatgacttctcatccttctcttccctaaggtgagggttacgtggtgagggaagttcacacagcagccgcrtggtatcggtgagaggcattggacctgtagcactctgatttggcacctgtcaagtctctagtcacagcatttgtgtgatcgggttttcagtgaactatctgtagtcttagtagactctaatcatgtattccatactaccattcctggcttcttctcaacattactgtgaggtcctttaaagcactggtcttgcatccagctcccttgttctgcccaaaagtgcatgaagtctcaactgccttcctgggcccataggagcctgctaactatcttctacctgctttatctacagacttctctcatatagttaaccatctccatctaagtgataccatgtcattcaatatgggacacacccatgacattgttgcttcacaaaattccagaagaagcaggctgtgcagccattccaactctgccaccagcacactatcatcagacaggggccttagataacgcttgccatcccctggctttcacctggagagtgaagcacaaatctccaatgctcaaatcttcaactaaagggagcttctatcattatccctggtctcaggctgtagaggaaagaaaggcagaacacagggctgccatgtctcctgaaccttgtttcaactccccttctaaccaaggcaacacttatttaataatgtgatgagatcatctcactctttggctaatttctttccaatctgttgttaaaagttaaaataaaaataaatttatgcaytgatatcttcagagctttattttaaaaacycaaaacccttttctatttcatatagctcagctgcttgaaatacactatcttgtgtgtcaagattattaagccaactagaagtttcaggagcctacttagaactcagaaaaaagaaacttaacttttctttattgcattaacactcttctctgaaaaaacattgtaatggcaataaggttccgtccagttcagtgggaaaagggctatgggtattgaaaacatatacagactacatatatacataaatatacacatacacaaaaaaggactttctcagaatatacaacttaatatatcaaaagactatctttatacatttttatgatagacaccataaacatagtcagctatatatgttacataagttatgaatagaaaacactggttttatccacatatttcttctttctccttcttctgtgtcttctgaaaacatttgaaatatcaaccatagctgcctacatagggtcctctgacagaatattaggtgataaaatggtataaggagacatataattgaagtggtaagaccagatattactcagagagaatgtaaaatcaataaagagtagaacatcaagctttatatttaggaaaaatggggacagaataactctgataccaaaaaatgaaaaaagacatcaggaaaaaactacagaaccttatttataaatataggtacaaattttccaaataaaatcttgataaatccagctgaatagttaaaaatatgaccaaataagatttaatccaggaatgtaagacaggtaaatttaaagatacctattaaggtaacatatttaccacattaacagataaatagagaacatatatattaccatctttattgatacctagtatcaaaggccaaagtacttgaaaatctaatttccacctaaggtaaacaaacagcaaccgacaacgaaaataaagctcttgaccaactggaaatagacaggaaaaatcttatttgataacatatgaggagcctaagggaaatattacattaaatgataaatatcagaaggatgcccatgaaagtcaagagggacgagaggttctagtcaacaaagaaaaaaaattgagatgtataaggctttaaaaaaaaaagaaagaaaatgtgttattttgaataatatgactacctagaaacacacagacaataaacttaaaaatataaataagaatattytgaaatatggttggaatcaagatcaacattaatggccttcttatacacagaaataagcaactggaagacttattggaaagaatattttttaacaataacaaaaaaatatggaaaacctagaaataaacctaagaaggaatgtgcaaagtttatatgaagacaactataaaatttaaccaaaggaaatacaagaagttctgaaaaatgaagatacgccattcattcgacaaaaagttaaatccctaccctatcctggaccctaatctcaatagaataaacacagctatataggtactagaataaaatattagagaataaagagaaagtgaagratctgaaaaggatactactggggaaacgtactaatgaatttagtttttcccaaggtaatctttagcagcagcatccatgaataacttttatgaatgtccaatttataatacagtactctaaaactgacagtttttattgaatataaagaacaatggttgcctgtgaaaagtgaaattaaattttcttcttaaaagttcctttattttttacaatgtacatcgaattttttaaaaatcaaaatgaataaatttttaaaagttaaaaatataatgtacataataatactaatgcatgacatcagtttggtgaaatatttttcttatataaattaattatgaaaattagcaatttatacactataaatctttaaccagatactgtataaataaaaagtgttattactcttcaaaacttcttcaatgtaaattgtaatattgggctttattacttaatgtatagaatctgtgtatatcctcttaattagtaatttcagatattttttcaaaatttctcttcttcagttattctcataaatacccaccagttttaagagcaattttgaaaacttctactcaaaacagaaaaacaataaaaaaacagggaaaaaatagaatagaaaaaccttctggtcaytcataagatgtacagaaatgttgttcatgagtaatcttttaaatgttcacctctatatcaaatgtaatttattttctactctctgagcaatgatccaaacatatttgaagctatttttttaactaaggagaacatacaattagtctattttgattttgcttcatatttcaaaggtttgtgtttaagctttattaatagtgctctttaagttattttcctcccaataggtctttaattacatgtatctgaaaatacaaagtctaattctgttagaaaacttaatgattcttaaaatatttgctttcatgagtatatgattrtctgaaaaacaaactccaaagggcaataattaagcgacatggggttccacataggcagaatttagaaaattaaactaattttctattttatttaatttaaacattaaatttaaatttagaaaattaaacatacaccatatatatatacacagaaaacttcatattgaataaaatacaatcagctataaagtagattaacagactcagattccttttaggctagtaaatttgactcattcaacatgttcagatgcagttggcccactgtatccatgggttcctcatctgtggattcaagcaaccaaggattgaaaatattcaaaaaaaaatttgcatctcttaacatgtatagactttttgttcttgtcattatcccccaaacaatatagtataataactatttatatagtatttacattctattaggaaatatatgtaatctagaggtgactttaagtataagaaaggatctacataggttataagcaaatactacactatgttatatcagggatttgagcatcctcggattctggtatcaagggaggtcctagaccagtccctcacagatacagaggaatgactgcaaccccttattcaacgttaaatcccaattgtacgctttttagtgtagcactgaaaagttttagaagaattctcatataaacaatgctataaagttaactttccagataaactgaaataaaactggtttttaaaaaaagaaagaattgacaattttatagttatttttattcataagattttaaaagcatatataggctgggctcagtggctcatgcctgtaatccctgcactttgggaggctgaggtaggcggatcacctaaggtcaagagttcaagactagcctggccaacacggtgaaaccctatctccactaaaaatacaaaaattagccaggcgttgtggtgggtgcctgtaattccaactactcaggaggctgaggcaggagaagcgcttgaaccaggaggttgcagtgagcccgagatggtgccattgcactccagcctgggcaacaagagtgaaactctgtctcaaaaaaaaagcacatatatgcaagctacaagattactatcaactggtacagtactttataaactacaaactcatctttgccctaggattaatcactaaccacttcaagaaggaatgtggacacagactggcccactgtagcatttaaagttttttggctaaatacacacatctgtgttgttcttttcaaaccgtcaagatataaaactcatttaaaacctatttttaaataccatgcagcaatgatcccttagaggcagcaactttagatgatgcttaaacaatgaattttttttccaacaataacaattttctttaaattcatttacaaaacctcaccacacagcatgaggtatactttcctggtaagcaactataaagtagaattaactatcctcaaatgaccatgaaattaagtcagccatatcagattaagatgaccataaatgcagttaaaaccatgctaatttacatagccccctaaccatgtttaattgccacattaaaaacccttcagatgctggtctgtccttttacaacttagaacagtgtcacctgaattaacttgttttgtctgaatgttgcactttgttttttcatttatatagctgggaacattcatgagctctagttattatgtctaaatatttttattaaacagaataaaataatcaaatctatcaaactggttttaatgaagtaagcaatgcatttttaaaaggaagtactctcttagccctaagcaacatgagtcatcatgaagaaattatatatatatatacttatccatttctatctggtacttttaaccatgtggggcatgccaatcttcccatgagcatggaaactgaaagtaacccaagggcactagccagctttggaattactgctataatgcctcctacaccacacccatcacactcccatactctgatttctgcaagccacagcaagccaaggttttcaccctagggcattctggactcttttgataccctatctcagagtagaaacccaatctttgtactgggctgtcaaccattcactttttagattcagagtacataatcatttggcttgtttttgctataccctctgggtgcctcacactctagaatgaactatttgatttgctgacatctagtatgtttagatttcccttcctttctggactactctttcacgtttcctcacctaccccacagcctcagatgcattatcttactaccctctattctcagctcctcaatgaccaggatataaccaggaactgaggataaatcatttattccacttgttacttaggcaaccccgaaacgttaatgaaagcatcttttgccatcatgtattatatagaatcttcagtaagcagcaatgcataacaagacaaaagtgactgattctgacctacctaaggaaaaaaaatcacattatcttgtgattatcttggcttcttccctaacacaataatctttggttaccataatgcctaagctcaattagaagtcagaaaccccaaagtatccacaccaggcagcaaagcaagaataatcaagattgacatatttcaacacacatatagttgcactgaaaggctcccttaaccaattcaccagacaaccccacccccaaaagaattatgcatgggtgaaatttctatagtttttgcactaaaagtaaagtcttcccatggctgccagaaatcaccaatatgaccgttctcattgttgatcttatgctgttatagcaaccaagggagacaactggaaatgggagaaagtctcttttagactgatgaaaattaacaagggacagaaatcaagatagtaaaggaaggagaaggtgctgtgatttagccagagataatcattgtcgacatactattatatttcattttagatctttttcctaggtgtgcagattagtgtactcaactccatttcagttgtgttctttcatgcacgctaagttagatagctagaacaaaagctaagctagaaagctaaagtttatttcctagacttcctgacagttagatgttggcacatcacctagctcttgccaagccgatacactggcattactttggaaggcaaggttaacacggtgagacagaggctggctgctgttgcctctgctgtttttactggcaaggtcagtgatacaaaaatttgatttttctgcaacgtagatctgaatgtccaaactctactttcatgaaaacaaaagctagggccagggcatccatgtgaggtggcctcctaattctccaggtttttgtttgtttgtttgttttaatgagacagagtctctctctgtcacccaggctggagtgcagtggcataatctcagctcactgcaacttccacctcccaggttcaacagattctcctgcctcagcctcctgagtagctgggattataggcrcccgccaccactcctggctaatttttgtatttttagtagagacggggtttcaccatattggcccatctggtctggaactcctgaycccaagtaacccacctgcctcagcctcccaaagtgctggaattacagacgtaagtcaccgtgcccggcctctccaggttcataaacaccacagaaattgcagcttccttagccacctataaaatgagcagccactactccaagcagaaacatgctcattggttgttaagcaagaaataaactttcattgtgtttgaaccattatgcattttttaatctctttgttacataagctagtggttaccctaactgataaagagtccaataaatatttattgaatgaatgttaaagaagaggaaataaatgcaagaagtaggtggagggagggtgggaaagatggtgaaagataaatagatggttaaggatcttgattttttaaagaattaatgggataaatgttctcttggagtacagaattatttcatactattataattactaaattaataataacctatttgaatttcttttctattggtttttcagtataacatctgttcacaattcctatcctgttgaaatttatactctaatccactccataaattttaaaaaatggttttggtttctgattacaatttcgccataatgtgattacaatttcgccataatgtcattacaaatccaaaagtaagggaaagtcctccataatacatggagctaaaatcaaatacagacatcaacataatacatatgcaaaaactagatttccattttattacatgcatactaattattaaaatgtaacacttttgataatattttaaagcagtgtccccatagtgtgctctgaagacgccactctgatggtccccatgaaccttgcagggggtccataaggcctccctttcccaagtacatacctgtgtgagggaagattgttttcatacatactccaaatcaaataacattacacaacatattgaatgcaaaagcagatatgagaatccacctgtttgtattcggccagatattgaagagatttatgaaaatctaaaacaggcctggggcacagwggctcttgcctgtaatcccagcacttttggaagctgaggtagaaggattgcttgaacccaggagtttgagaccagcctgggcaacatagcaagacctcatctctacaaaaaataaaaaaattagtcaagcatggtggcacatatctatagtcccagatacttgggatgctgaggcaggagaatcacttgagcccaggaagtcaargctgcagtgagctatgattatgctgctgcactatagcctgggcgacagagcgataccttgtttcaaaaaaacaaagaacaaagcaaaagtaaaatagtgccctcttctcactaaatatttttgttttgaaatatatagttatttttcataaaactgtcrtatttatgttgatacataataaatatttttatttttaaatgatgaatatatattttaaattttctcaatcttaatttccaatatgctaaatattgatgaaactaacccacagaacagaagctctttagggtcctaaatttttaagagtttaatgaaccataaataaactagtgaaatcctgtaacaatgccaggattccttttattaatagtaaacaataaactatatttaaatatagccaattttctatatgtacaaaatgctaggcagccttcctattgctgtagtagaaataacatggcattgaacacatgggtttaaataccagtttcataacttattaactgtgtgggcatctgttccctattattctcactgctaccattacaacaaactcaacgttatgcatatcaaaactaaaattgttgcattttgcaagcattcttgaagatttaattgtgcaggattatagagagtaatttatatataattatatacacttactaattcaattatctgggagtatattttagctaactcactattcagagttatactttctatagtagcagttgcagcataactgagtattcttaaagcaagcaattaataaactccaacataaaatttttccttgccaaattatatctgtcttgttctatcgaaactcaacaaaacatttacttgttcaagggactatgttgatccaaagatttcccttcaggaaaatgctggtgctgcctagggatactagtagctttccataaaaaaagtgttcaactaagagagctgtccaggccactcatctttgataacagaagttcagctttatcataacctgtatgtcaggcatccaaaacctaggaaactactcttcattactaacaagataataacctttcagtaggtattatctcaattctttttctcatctacattttacaaaatggtttgttgaagaaagttaggttctaaaaaggaagctctaaaacaatagtcttcattttttttctctcatattcctaaaagaattttctaaaaatacacaacatacattttcagttgacatgtaaaaattttcatcatgaatttaaatgattgcaaaggctataatttctagcatgttacaaatactgccatttttatataaaactgttataccagtcttttaagagtaccaaagaaatctaacttccacagtaatctgatatacaccagcaaccattttatcaaaaaaaaattcaagagttagaaaatttatacacacttttttgcttaaactcatttccagttatctccccataggattttaccctaatgtaatcgtttttatttctaaaagtttttaactgatcctctatcatacttctcttcaataaaaatgtaccttaaaattgaacttttaaattgtgtttaattttctaaaactgtaatgttcaaactaagaaatatatggaaatgtatttcttaatgagaagggctagatttttttcttttttaaaatagtttataggcctctgaatgaatgttactcattgctagtataaggtttcacatacattttttttctattttttattttctctgtttatgaaagaactgaaactgttcactaagtagatgagaaggatgttttgttatggcaatgttactaaatccttcaaaatcacatagcttattaaaaatatttgatgtgtgaaaactatcagctgttaactcaattacatctcccttaagtctgttgaaaccgaagaattagaaaccatatgagttgcaaaaggattttttaccttgagtttaggtcattcactttttcaataccaataccaataccaatacttctagctaatcctctgctatcatgatgcaagggaattttccatcctggagaagtgtacaatgagaagatctgggaggggcgagaagtctgccttgcttgttgtaacatgagtcaagagcaattctgaaaggggagttaggaaaggaaaagctgctttcactgtctttcacaggaggaccaattttaggacagactatggaaactgaggacttagattccttcaaaatcaactatgtgcaaccttggcaaacaatcatatacaaatttgaagacctcaaatctaagggacactattccttcactactccaagtgttttaaatcccttctctctgtctctttttttcatacacacatgaatgcaagccaaagcccattcacagaaaacaatcatataaggcacatctttgcatttattataaaattattgttggtgccacaataatcacaatactgaataagctctaaatccttgctactcaaagtatggacttcaggacaagagcataaagcatcataaccctgttagaaatgtggaatttggggccccattccaaacatactgaatcagaatctaattttaacaaaatctccaagtgatccctatgcagacaaaagtttgagaagcacggacctaagaagcagagaaataatttttaaaaatgtagtttgtaaaaaacatacctcttgtagaaataatatttcctcctttttgatcataataaagtaaccctcatgtttccatttttgtcaatcttactagcaccagccagtgtatttcctaagaccgttaaggcttgaagtaaaaaatatattggaaatgtatctcttcctcattatcctggatttctggagtgttagtctagctgatttgtctgcctacggtctttccccccttcaatccatcctctgcacagctgcaagagtagaatttatataacaaatctaatcataggactctcctgttttaaaaccttcaaggtatctccaaattaaaatacaagcatataaggacaagattacctgatccctattgacctctctagcctcatctcccaaccacctcccattttctcctgtacttactcttttagctccctgtacacaccacgtggttttatgcattacctttccatcatgttgtcccttaccagaatatccattccctatttattgcctagctgattatcacctgtgcctaaaggttcgattcagtaatcttcttttccagaaaactttcatgtaagatccccccccacacacacacatctacccctttatacacatacaatgggcaaaggttattttctttgtactgtcacagcacttaccattttgtatttaaataatatatttatatctctgtttctctatatagacagtaacctcttctaaggactaacaaaattaacagcacaaagcaggtgctaaacattaaaagtcaaattgaataaaacaaaacgtgattgttaatcataagaattgtaatagccagctcttataattagcatattcacttctctattcatatgcttttagtgttcttatgtcatctgctagttatcattttacttttattttggtttaaaaaaaatctacctcaattcttttttttgcaactaggcagagtatacatacgtatatagagcacagctctgtgactttggtgaaattacataatgtgtcttagtcacagttcctttattaataaaatggtaattacaggatcatattcagtaggtaggattaaatgaggatgctatagtcccagctactcggcaggctgagacacaagaatcacctgagccctggaggcagaggttgcagtgagtcaagattgcgccactgcactccagcttgggctacagagtgagactcggtctcaaaaaaaaaaaaaaaaggattcatgtgaaatattttatataaactataaacattggccaggcacggtgactcactcctgtaatcccagcactttgggacgccaaggcaggcgaatcacttgaggtcaggagatcaagaacagcctgggcaacatggtgaaaccccacctctattaaaaatacaaaaatcagccaggtgtggtggcaggcgctgtaatcccagctaccagggaggctgaggcaggagaatcgcttgaacccaggaggtggaggttgcagtgagccaagatcataccacttcactccaacctgggcgacagagtgagactctgtcaaaaaaaaaaaaaatctataaacattatatacataagtaataaaaattgcttattttattaaaatcatccattataacaaaaagtacagtggttagaactctaaacaacaggaaataccttaagaaataagataaactttaaataagaaggtcttaacctttctgctgctgaacttttaaaattgaattcagtataaaattaataccccgcagtggcctttgcacaatcctatatctccttagtttcctgtacttcacgaaagatgtaggagaaataagtgattatttgaaactgttcaggttttgaaacacaatctgctatcatgaatatttcatttcttgaaaatattttcatgcttatccttttcaataatgccacatcataatgctttatttcatctgcctgtgacagacatcattactaatcctatatagctgcttgtttcacgccacgctagagcagctattgaatttcctacaacatggcagccagtcctgacattcatatgaagaatactatgataaatatataaaggactataaataaggcaacaagaattaaaacatcataggttctgaaggtggcatcttgacttaattgaaagaaactcaatacataaccaaagctgaaggatgaaaaggagaaacaattaccaactagtttataaaccacaatttaatcaacttacagggcaaataaacctagcactcagatcttgttgaaaccgatttttatgaaacttggttttatgaaacttggtttttaatgccattcctcaccaaaaagaatcatggcttctggagaaatggctagcttcagggctagatagagaaggtacacaattatcctggagcaccttgctatgccaaaaagtaaggaaatgctcaaaaatgattttttaaaacctatcacaaagacttagaattataaaccaccagtaaaaaaattttctaataaaaagtagaaggaaatgaggaagaagggatgactggtagagcaggatgctgaagactgactagtaaatgaagaggaaatactggcactggtacatcatcattttgcaaccatgacaataaagcctggtccaggcaagaattattagtagatgctaaatcaagaagagaaatttacatgcacggtctctgagtatctccccatggattgctcattaatagcaaggggataagtagtaactaaaaaatagagaaactagacagtaccttgaccagataaatactgagagcttccagatgcgatgcctggaaaaggaaaatcatttatataatatcctggctaggaatgcaaaatctgaacttaactcatgagaaaacatcaaacagacctcaaatgagaagcattctattaaaaaaagaaagaaaaaaaaaaaagaaagagcaagggcgctgtattcttcaaatatatcagtgttataaaagacaaaaaagcaagctgaagaattgttatagattaaagattaaaagagattaaagagacctgaaaaccaagtacaatacacggctccatgctggatcctgtactggagagaaacaaaaagcaaatgtttataaactacattactaggtacactgacaaaattcaaatatgaatggtaagttaggtaatggcaatatattaatgttaaatttactgacactggatattatactgtgattatataaataaaatgccttaatcttaggaaattgcattgcgatatttagaggtaaaggaaggcaataatatctgaaactttcggaagattctaaaaaaagaagaatatatacatatattcattctctctatacatatgcattctctctatatattatttcataaatacattcattgtctctgtatatatgtatacacacacgtatatatgtggagaggagagacagggagagagatcacatgataaaaccaatgggacaaaatactagcatgttaacacttgctaagtcctagctttagaagaatataggtattctttgtaccatctttgcaactttgatgtaagtttaaaatcatttccaaatacaaagcttgaggggaaaaaaagcaggcaaaagataaacacaaaattcaggtactgtgagagagaggaataggagagaggaggaacgcacagaagaatatgctgacagtgttctcggtgacacttgtggctgttcctcttattgttatgctttataactacctacatgctacatatattcctgtgtgggtaaaatattacgttaggaaatattacatcagaaagaagaataaagaaaaaaataatgttctgtaaattgttttaataatttcttcaaaactacaataagaatacgaagagccctcacaatgcaagcacaaaaggacatacgctaataggtatttccggagtaacaatcattaatttgtttttattcctactgggttaaaagcataatactatatttaggtccagttagttagttaccttcattcttcctcaatttggtagtacttgtttctctcagcaaaaaggctttttttttttaacacaacatgtagtacagttaacaagagttaatacacagaattatagctaacatttattgcttactaaatgccaggcactatgctaataagtacttgatattcattatatctttcaattttcacagttacttgagcaatatatatcctattattttccctcttttcgcatggggaaaaaacagaaatagaaaggttaagtaacctgtccaaagccacacagctagtgtgagtccaaatttgaacccagagactctcattctagacctcatacttgtaaacaacatgctccactgcacttgaacctgagattctgatctcaaatagttcttacattgaaaacagaggtaaaatgcccatatagtactttaaaaccagtggataagcaatagatgatagctattatttccattcactgagcaacaaacgctgtacataaaataaagactatcttagatttgaattctcctcttcgtttttccttttgaccactcattaaaaaaaggaaaaggtattattaagtaattaagatgccaccagagacaaaaggatagaaaaacttttaaaatattctcaatctatacacactagataatccacattttataaatattgaatatgcttatatggaaaatgctggttatattggatataggaaaaaagagttttccagcacaatagaattatcaggtgtattaagtggatatgtcattttacggcagcccagcatccagcccttttcctgacatcacccctacttcttttgggggaattttctctactatgcagtcctggtggaagcataaatccaaatacatgttctccattatggaaaccaaagatgtcttttaaaggctacttccagaaaactctctgctcagtccaatggtatagggaagtgaacatataacccaagttcagtcagtcagacacattctctcaagacttagtgtattaagcagaatcaatgcacataccaaagacgtggttagagtttatttacgccagcaacacagcctaacatttttgttgctgttgttcctgaaagttcttgctaccaagaccttccagatctgcctaattcttatctgtttcaagcataactctttagtctcccttcaatcctgtgagcttttcccatcccagataccagatatgtctaacaaactccttttttgcttttaagtcaatctgtttcctttactggcaacaagagtaacaacaacgacaaatctgtaaaataaaatataaaagcataaggggataaaattatataatcttatttagcagttctttgggtgacttttattcttttccaatggtttagtatactggaaaaagtactggccaaagtatttaaagagctaaaatctagtccaggctttccatcagctggcttcaacatctgaagtgtgaattcattctggtcctcattttttttaaatatgtaaaggaaaatggtttgaacttcaagttttgttatattcataaaatattatgttttatagaaaggaccaaagatttcaatgacaataccaataatacagaccttcttttaagaaattagcacatgaatgactgttacagtatttcctattcttttttaataatattgttttcatagaaataaaatgttacagtagtttttcaatgacaaacaggaatcaaatactttcagaccatttccctaaagggatgacattacatatcttagaagatttagtggtaagaaaaaaattggtttgaaatattactctcagtaaatagcattacgtttgtaagatctacaggcaaaacaatgcatcttctataggtttttacattttgtaataccacaacattctcctgaaatgtaattcccttcatgttttcaaatgttttgctacagttgtataaaattcattggtataattactaaggaatatattcataatagtactaggatttcaattttcatgaaagggctaaaattactcgtgtcaaagtcaggcaaaattttgcaaactggcattaatcatggattggtgagagtctaaaaagccagtaggaaatcatagaataaggtcagaaggagttttaatgttgaaaccaatatatcaatagaaaagtattgctatcaattctttaaaaattaaaaaacaaagccattttcaaaagccaatcaagattaacatcattaaatcacatctccaagaataataattatttaattttaacacttatcaagcattaactgtatgcttgatttaaaaagcaatgagactttgttcttctcataaaagttttatctccctagacctaggcttagatatactatttgttaccacctctcacagcaattcaaaacacagaacaactatcatggcagtcattatgctaaattctagatggtaaagaggaagatgaattagtccttggtcttaagcactcaccgccatgaamtcaactcaatataatgtgatccatgctagaaaacaatggtatttagtataatctgttaaggaagcaattaattctgtttagggacagaggaaaacctataaagaaaaggtgacatattaaaattttataaaaaatatcaaaaactcttatccagacaaaggacttcattgtcggtcagatctgagtttaaaccccaactctaacctgtgttgtcatgtgaaactgagcaagttgtttggaaacctagaatctaggcctagttctgctgctcttaaaccatgccctcaggcaacatttaacatctctcagccccaatttcaatggagagagtcagtgagtcattctctatgatccttaatttcccctccagtaataacatgamtctacaccttatagtaaattaragaaattcctattgatattgaatgtgttcatttagcaaatacctctagaatatccaactaagtactactgggcttagcaagtggaatacatcattgaacaaaataagcaaaaatctctgttttcagggagattacacagaaaacgtctatggaaaaacttttaaaatactttattgcacccttgttcaaacgtaacttccctgtgcagttgacatagacgttaaaaatagttaacacttgaaaatttccaaataaccataaatattaacacagagaaagaaatctagatagtgatgaagcataattagtagcactaccatcaaaatcccgtttctctaaattcacactgagtcagtgagctttagtggcttgacaaaaaggcagcatgttaacgagattcccctaaaccagtttagtatatagccatattttttttctcatttaaattattccatagtttcttaagaactatgatacaaccaggtaagttttatttaaagataaataaaatctgcacatggtgagaaaatattaacacaaaaacctattatctcacttctttttcagacattccacttccatacctggtgtttttcagcctcattttaggctattttattatataagatttttatttgagttatatatcatcactgtttgaaaactgatttattattcaatagtcaagtgcaagacatccattcttaggcatctccaaagcagaaacacagtcagagtatgccaggtgatggaggggctacagaaaggatacatgatgaggtaaggaagaacagaatatagctgccctcaaaatacatagcaacttgaggagagtcgtggcaagtcttacaatcttccatgcttggactcttcttcactaatctactaatttctctgtacgacttttcccattctctcgtggtgatgtcttcttcatggctgctacagtatcctagattctgcagcctgccttctctcaaaatgtctgcatacttttgcatctttctattaattgcatccctttcttagaaaagaagatcttactggggttgtggtgactttccagtatggactataaagtcctcttgttcagcccccttaatggctgtgtgcttttgactgcctttggataatggggtcacaagatttttaaaaaacaaaatcttgttagcatatgcctaaggcatccatcaaaagaggactatagcataggagtaccagaaagtttctaagaaagacatgcaagtactttctgtggactgttcaccatgtaacgatacagtatcaccatagagactgtatgtacagagactgaacttaaaagtcactcccacaatgttaaggcattgcattaaaggcacaaaagtaaagtaaacactggcaaatatatatagcatatactaaaaatttaaaattctaaaaggtgtgaagaggtgggtgtagtcatatgtttatgtaatttaaataggctcagcttaggcaactattctttgaagcaaaacaaaacaaacatacaaataaaatattgtgaaaacactgtttttaaagctgagctggtcagcatcaaacacgcacttcaaagtagtgagtcttaagtttcataactggtattcttcaaactgtgaaactcagaatatattgasaaatggccacaattttgggtaagagaacaatcaccttgacaaacattttccaaagtttcagtattccaattttgtcaaggagaaacagccaggattacacaactgccagtctgaggttctgtgccaacatcatgcataaaaattgcaagcaatgaccaaacaaaatataaaatacaaaggacaaatgcttgaggaaatggataccccattttatatgatgtgattattatacattgcatacccgtatcaaaacatctcatgtatcccataaatatatacacttactatatatccacaaaaattaaaataaaaaatttgaaaaaaatacaaaacacaacaaagaaaactttggaataatacttcctttaagctgaatacttctataaaatactggagccacatgaaagaaaagaatacgtatctcttgttctccttccttctgtcagtgggcacatgataaatattccttcaccctccacctgccacccaccagatcccactggctactatcacacaaccacaaaatgagccaccttacaaggaagcagataccaaggaaggcagagaagagagatggagctgactgcctataaacattcaaatgatcacttgactttgtcacttcttctgatgagttctgttcttttttttttaacataagcaaattctgtttcataaaataaaggaaatgatgagcatggtacaggatggcagataagaaagggtatttaatctatctctttccctcctagtctacccaaaaggccatgaacataatgtatgagcaaggatgataagaaacactagttttgcactagcaaaacaaaacagggacagaataatatgagcagtcataattcctcatcagtttcatttttctatttcaagtgctgtagatcattgatcatgttcttgcaaatacccataaagtctacacattgaagatgaacaattagggtaaaagtgaacataaaacattgatgtaatctgttctgttacccactggaggaaggaacctataaaattatccaaagttttaattacggaggattaagagacttgcccctacaatatcttccaatgttttcattattgaggattaagaaactttccccaaaacactttaaagtagcattaagtggtgaaaaaaaaaaaactgtagagagaaagagatcacatgcctcccacagggtagttgttaaatgagtatttcttaaatttaactgaaaatatataaaaggaaagaaaaaaataagttttctatgaaaaggaaaaagaattcgagatgatcaaaaaggttaacatactggaagacagtgtggcatctgaggaataaaggttggtatcatctactgggcagaattgttttgaaaactggatgagatgtttgcaaatatactcagcaaatgtcacacagtaaatacattgaaattgagaaaaaacactgaataaaagagagaaacctgcttttcactgctactaagtaaggtgaagtggaaaagaggccatgcagttaggatcctctttcttggtcctttcatgatccaggagctgctgcttgtaaagctgctctggggcagacatttcaatttgtctgttttcttgacaacttcagttataagctttgctaatgtttataagttcccattggagaaaaattggttagtgaggattatgaactgaaggaaaatgccttcaaggatgggttggtaagattaggataaattctaatattatacaaaaatagtaagattatactctacatattttataccaaatttatttctcctgtgctgagtacagtaactcataaatcccactcactctgtccccaagcatgaatgaagaacacgagaaaatacatcagggatttaaatgaatgcatttttaagttaaggaactcatatttgacaagaatggcttatgttttaggaaatactattttgaatcaaatcgaagttgaggtgggtttttttcccctacttttttaatcgtggaggaaaaaaaaagccaaacatcaatttctaatggtaggtttgctctgacccttcccattttactctgcagcaaagacctcattcagttcctgaaaaaagccaagccttcatcatggtcacttcagattatataatgggagctgctctgaactatccaagcacaaagcaggtctccaaaaattgctcacatgctaaagcttgatattgtcakgtgtctataaatgcatactgaataatgtaaattggtaacctgctgacaatgcatttgcataaatcaagtcaatattcatgtaataaaatcaccactgagccttttatctttcctagtactgatcattctgtagctagtaaagtcctagactaggctggtaacttaaagttaatgaatggaaagactggcatcctagaagaacaactaagaaaaacctaatagaacttagtgatgagaagctagttctcaagaggaaaaaaaccaaaattaggaaaaagaaaatgacaagactcaacaattccacaaagtgagcttttcaaagtccattctttctcccacattattattgtccttatgtctaacaagtactctgatgaacaacatatcataaggctccttgcatttttcacagtataaaggggaaaaagccatatagctcttacaaagttaaacccaaaagacagtcagaccctgagagtcaaacaagtaaaatggctttggccttaaatcaaaagctaatagggcctgaccacataagtctgaccctttaatagtattctctcctagcttggcaacccaagtgagaaaacaaagtgttgaggttatctaagcctgtgtgaagacactggatgctgcattcaatgttagctacagctatcacattgctgagggaaagttacattaaatcagggaaaaaactattgtcactaagtctagacttttgttttcagagacaagaaaatgtgaaatttaagcatcaaatatgatatcacgatgtatcaagaagacttgaatatttttggtaaatatttacagttcctaccacagttttagctccttcatagcggggggtcttatactttagtgttgtctcccactatttaggaggtgctcagaaagagagtcttcactgattattaactcagcagaactctcaggatgtaaactatagactaaaagtactcacacactgatgccgtatttgccaaacattaaaaggaacaggcttgttgagtgttgctacaaagagtagaggcaggtcaaaagacaaaaactaccaggaaacagatgaaaagccatctaaagtaataataatagtagtcttatgagacagtaaaatatctgccaccaaaaaaaaaagtggtttttaatccaatccacttgcttaaattatgatgtcaaggtctggtactcaactggctcgttcataatatctgagtgaagcctggaaatgtgcattttcaacaaacacagttctcatgtaggtagaaaacaacatgtaatcctggctaagcaactgtaccttagcaaacctgtgaacagatttcctgagtttggtaaaagcgacttttttttttcaagatggagtcttgctctttcacccaggatggagtgcagtggtgccaactcagctcactgcaacctccacttcccgggtcaagcaattctcctgcctcagcctcccgagtagctaggattacaggtgtgcgccaccatgcctgactagttttatatttctagtagagatggggwttcaccatgttggccaggctcatcttgaactcttcacctcaagtgattcatctgccttggcctcccaaagtgctaggcttacaggcatgagccaccaggcccggccaaaagtgacatttttgaactgagggtcatgtgaaatttaagtctttgtctctatgagattatgtagttgggtaaaataaagtaacaaccagagcaaaaacaataacaatagtaatacaagaaacctaaaaacatatattacttgagacatgttatagtaccatttttaaagaactcaggctctggatttaaaatgacctggattcaaatcctacacaatttactagctctgtgaccttgaacaaataacttaycttctctcagtcccaatttcttacaacagttagctaacagagaaattatgtagagtaacactgtgttacataacgcacactcaaaattataaacaatgaagagtaatggtacaaatatctaaacaaatctgacaagttttttggtaaaaaaaataaattccaaaagtaaaaaagccccataatctcattaacttaaaatacatatgtggccaataaacacataaaaagatgttccacatcattagttatcagggaaatgcaaatcaaaaccacgagatactacctcacatctactaggatggctacaatcaaagaaatagataataacagtgttgatgaagatacggaggaagtgaaccccatacactgctggtgagaatgtgaaatggagcagcagcttccgaaaacagtttggcatttcctcaaatgcttaaacacagagttaccatataatccatcaattctactcctagctatatatatatgagaattgaaaacagttattcaaaaatttgcaaacaaatgttcataaaagcattattcataatagctaaaaggtggaaacaatctaaatgttcatcaactgatgactggacacataaaatggggtctatccatacagtgaatattattaagacataaaagggaataaaaagtagtgatacatacaacatgatgaaccttgaagacatcatgctaagtgaaagaagtcggtcacaaagaaccacatatcatgtaattccatttatatgaaatgttcagaataggaaaatctatagagacataaagcatattagtggttgctagggacagagtgaatggaggtggcatggtggtgacagctaagggatgtggggttttctttgagggtaatacaaatgttctaaaattattctgatgaatgtacaactctgtgaatatactagaagtcattgaattgtatacttcaaatgggtgaatcatatggtatatgaattaaatttcagtaaaggtgtttttaaaataaatatatgtaatatatatttgcacaataaaaaatatagtatatatagttattttcttctaatattggattttccccctagaagtagctccttatcaccaagttgtataggtttttcttagtcattcttctataatgttactctttcctttccatttcatatgtaaatatatatatgtgtgtatgtgtatgtgtgtatgcgttcatatatataaagaaggaaaacatccctctatagtacagctctatagtatagtatccttctatagtacagctctatagtatagtatccctctatactacagctctgtagtatagcatccctctatagtacagctctatagtatagtatccctctataatacagctctatgatactcttcatgcccagcacctgttcctgtggtaaactgcttttccctccattctatgtcattctagtacrgctgtcagtcacatgaaatccccaaatcccactcctgccacagaaactgcacaggaatttctgccaatgaactgtctcagctgtttatagttccatgcttccaggggcctatttattcggcttggcttttgattctgtgatataaccacattttatctaataaatcctcttcttattttgcttagataatctctgagtttaggctgcttgcaattacaaaactccatttgatatatactctaaactgttttaatctcttcacccgaagtaatgctatgaacaatttgctgttaatcctaccacagtattttctatgcatatacaactacacatccacatatatatcttatcataatactatacatagtattaatgtaccataattgattttagcatccttccattaataattctaacttaacttagttttacttattcatttttcttttaaaatcaaggggaatacggagaatccattaaaaaaaatcatgttaaaatccaagaaatatttatggaatagacttggtagctgaagatcgtgttttttaacacaactttagataatataaaaaaaactgaaatataatctctaatcaatttttgtttacaatgtagtttggcaggtaatatagaaaaattataaaacaattatatgtcaggatgtaagcaaaattgcatgataatcatcttataccagttgaagccatgaaaattcaattcaattttattaaatgtcaactgtataatgttttctgatatgtggattgtattggcactcaaaggaccacccaaaaagtttatagcttagcatacttataatccagttagtcaacattttataattgtcacaaatataaaaattgataaaacttccagcaaatttaaatatatttaagacaaaaatgttcatgacttttataataatacttcacatttattagtacttactaaatcttattatctaaattatttttcaaagcaattctatgaagcaggtattgttataatcacccaagggcaccgctgtagttgtaactggcaaatcagagaactgaagtcaagtctttctatctctaaaatccctttcttaatcaatatctgttatatcaaaattattttaatgactaaacagttgaactgaagagtgtttataatatccaattgcattctcacatcagtattaacaaaaaagctgttagcaacaaatccattgtctgaatcagctcaaagacttattaaacttgagatcttcttgttacatgakaagttgcagtatcaatttcttcagctctatcatgaaggtgaattcagattaattcaagccacctagctgacttgcagtctttacaaacataaaaacaggttagtatactctcttaagggtgtagttattctgcatgagaaacaggtatacaattccataagaatacaagataatttgaaacatataataaccatgttgttacacagtagaccttcccatatttatgcatatttaattataatatttattaaaaggctaatgagaccattttgaaacacatttactgaaaggctaatccagtagtagaatacaatctgtttatcaactgaagaacacaatacgtgacwtttgtacactgtaagagaagaccagaattgccaataaaatatcattgaaaacttcaagtaacccttatggtaaaaaaaaaaaaaaaaaaagtcctattaaagataagaaacatcatgtacagtatcacttcctctctcctacaacataattcaaacttaaactgatatgtaaatgaaaatttatattccagtcaaggaacgtacccaatgagagtacataaattatatatgtattatgcaagataatagttgttacagacatttcatcaaaagccattttaaaaactgcaaaatatgtcaagatgtttacatggtgaaatgaaatttcataatatggcaccttaaaacaatctcacattagattgctgcacctcagaaaagcactattgatatttcactgagccaaagaataatcataattcccttatcaagtgaatatagtggaaaggaaccaggctgaaagtcaaatagaaacaccattttctcaaataataatatattattaataatgatacatatctgaaggcttaagtttcaagatccgaaaattccagaagtataaaatgccacatattatcaaactctaaataacaaaattgtctaacatgtaactgcctactatttgctcatcaagtaaataagaactcattttaagattaagaaaactagcaagtcagttcgagtctgcaatttttagacgaaataacattcatgaacaactttattttctaacattaataacagatttcatacatccacgtaagtttaggtaaaaataaaatccatgtatacattgcaagtggcaactgttctccatagccaattcagtattatgaactatctaaataaaaatcaaaagtaagttactagaaaatagtaaaatagctccatcgaaaactcttctgtgcatattctgcaacattaattaacttaaaatgattaaatcactgctaatttatttgtcaggaaaaaataatattttattataatatctaaaaaatttgaaggcacttcacagtattacgtctttttgttaacaccatccaatggtatatttattagttgtcatatgaaggccccgccatgagagtttttaaacatttattaagaaataccctctatattcaaagttagatatttaatatctttaaggaatctgaaatagattatatattcattgactcctacaacatgcttcagccagataatgatcgtttgtcaaaatatgagcaagctaatcgtgtgatcctccacacacagactgataacaacactcagaatgcaatagaagcaaaactattcacctaaatggacatgaaaggactagtgctagggttcagattttttttctttaaaattttagtcccttgaaatttaacttcttgaattaacatgcagctattgaaaaagcagcagatatgtaacaatatttttactaacagctattccctagggttccttaattataagcagcagaggtatgcaagatggaaatacccaattaggttttcctggaccaatttagcttgtccagctattgaatattttcacaataaatagtcacagttgagtttgagagagaaaaattagccctttagttagcactaaaactagtctaaaattggccatctggcttgtctctgatatactctgatatcatattgtatcatcagacattgtaaaaagaaataccaggcataaactgctaaccttagaatacaatttaacctcagtattctccacaaaaaagtaacagaatctgtttctctaaggtacctgagttgattctaagtgaaaaatatcaggttattctcactactatctattttccatgtttccagaatgagagtgcaaatctgagcaccgtatttaaaaataaatagatctgagaataaagaaaaccatgttttcacccagatgcctgcatttccatcaacaagtgctgaaacaccacgcgaactgttgtagctgattaacccagcatatttctaggaagtacattagtttggtattagtagggtgcaaagtacaaaggtcagagagggaagtagagaagggccagaccacatcacaccttacagcagatactactaagctgagatttttttgacctgtaagacatgggagtcactgaaaaagtgaaaacagaggagcaatgtaagcagagactggatgagattttcactctgctagcagcgtagagctactttagtgaatatggtattccctagccacgtgtctactgagcatttgaaatgtgaccatgaccacaagttgaaagaatattctggataaactagatcaaataaactatattattataatcaataccacctgtttatttttatttttaaatgtagccactagaataggtaaaactgtatatatgccttgtataatacatctcaattggacagtacttgtatagatgaaaaactgtgaggaggaaaatacactaacaatgatgagaacaaggtagactattgcaatcgccaaggtgagagaggacagtctcagccagaatattaagaatggagaagaacaaaagagaaaagctcaaaagaagaaagaaaagatgcaggacttggtgactgactgagtataaggagtcagagagaaggcatttgttcattcattcattcattcaaacacatcattattgcatgcctaggatatgcaggtaccatgatggttatactataatgagctaaatggaagtcggaaatgcttaccaactctctggtttgagaaactgaggaaaggctgttatcacccattgaaatagcaaacaggaaagaggaacacttttattatcatcaaatgtatcaagtatgaagtgygtgtaggttatttaagtggaaatgtctgggaagcaattggatgtcatgatctgaagtgtaacagaaatgcctacgctgaagctagagaatatggaaatagcagcagacccataaaagggtttgctccaggagaggttgtagagtgataaggtcaagggtccaagacagaacagtgacacaaaaattctgaaaaggagagagaggacagacagcaagttcactaacaaatagccatgtatgaacaagaaaaattcataaagagtagaatcacaaaaaccaaaacagaagaactttttaaggaagtaacattcaatagaatcaaatacaaaagaaaagtacataatttcagagaagcattgaaaagtatacacaatgccagaaaaaaaatcaaaaagtatttggcaagtcagagatcactgatgaccttcatgaaggcgatcccaatggtargaacaagcaggactgccaaagactccaaaaggcgaaagagcaaaggagaggcaagaaagaccaagtataaacaactgtttctaaaatcttaactataataaaaaaataataaagtagtgagcacagaatcaagggatggtttggggtattgtcattttttattttggacatgagagagacctgagcatgttcaaaagctcagaaaagcaatcagtacagaaaagctgattaaaggggcaagaaatggaataactaatggagcaagagcctgaggaactgggagagaagacctagaacacagatggacaggcaaacctgaacagaagaaagaacacctcttcgtccagaaatgaaagtgaaggtggctcaagaggcaaagataaattcagaagcaggtaagaactctaggttctgtattaaaatattactcaggttatacagtaattaccgggcacctttagctaacagtagctgcaaatgtggttccatacttccaaggatttaatatttatagcaaatattcgaaagccaaggacacagattcatccaggtaggggagagtcatctttaatctactctgtggccagtcatctatactctactacacaaaaaataaacctgtgagaaatgattgccattagtcatggaggaagaaaatgtagactagagtgattggggacagggaacccacatatctctctacggtttctatctatgcacatggaagtagagagactgaagagaataaagagggtttctctcctgtctatataaccctaattagttccttcccaaggcaagagtcatagttatcatactttgccacagtttaaaccttttagatgaagttattgtgctttaaagaaatgagcccagattccccggacttctactctgcctgtttctgggagtggtaggcatgcctaggcaggatctggtcctccaggctgagtggtcataattattttgtgtgattaaaaagaatctcttggcctgcccatcctcatctctactctgcttcagtgtctccacctacaattgaatgagtgaagagtattgggcttcactggaccagaaaaccgagctacgcctacaaaaccaagactcatggttcaacactcctcattgaaaaagtcagacattgagggctatccagcctttgtccaccttttaaacagtactttatttccctgttggcttctatacatttttataaataatgcatcagtccagaatcccagaaggcaggaggggtaggtggaggattcaataatcaaaatctcaccttgaacctccaaaaaccctagtgacaaactaaaatgtgcactaagtttttctgcctctttctttttcatttttctttttctcactctgcccctcctgaaatccccctccttccacttttatatgttcaagcccatgaatattcagtttatatgtcaccttatcaaggaagttttctctgacctgtccagttacatttcagtatcactgcctcatctatgctcttgtgtcttatttatatctcaattaagcacttggttataattagttatttaattgtatctcccagccaggtgaggtggctcacatcttcaaccccagctacacaggacactgaggtgggggaaacatttgagatcaggagtttgaggttgtaatgagccataactataccagtgcactccagcccgcgtggcagagtgagagcccccatctctaaatgatgaagaagaaggaggagaaaggaggagaaggagaaggagaaaggagaaaggagagaagagagaggagagaggagaaaggagagaggagaaaggagagaggagaaaggagaaaggagagaggagaaaggagaaaggagagaggagaaaggaggaggagggaaaaggagaaggaggagggaggaggaggatgaggaagagaagagggggaggagggggaattgtatctccactaggaaatcaggtagagattgctgaattcagctttgtatctcaggccttgagtacattgtcaaggttggtccccactccaagtcacaattcattcctacttctcccaaactcctaaagcactttgtagggcagaaactgggccttgctgcactctatcagcactgcccctctattattgaaagaagacagaaagaaggagatcctgaaggcctttgtataataggtaaaaatcttttgactcttcagccaatcactgctccatttggcctctagctaaggaatctcttaagcagcaagcaaaaaatatgattcataaacragtgaaaatgagtcacgtagcagtaaacagaactggggccagaaaggcagctttggagttgtccccattcatttcaaaaagagcattttacatactttttacatatttacattttatgtatttttttaactggataaagttaggaaatacataaattgtactaaatttagaatttctaacttgattaataatgacaaaacaccttataaagtatattacagcacacaaagtacttcctaacacttccattttatagttgaggaaatgaatttttagaaaaattaggtgggttctgtaaggccttattcatcaaccaataatgaacaaatgcctattttgtgcaatgcactgggatttcagcagccctgccctcatgcacctctttcttatagggaagacgtgtaataaataaaatgtatatgtcaaatggtactactgggaaaataaggcaaggtggaggtgggggggcaagggtacagttttgaataagatagccaaagaaggcctcactgacaagtggcatttgagcaaaaagggggtaagaaagtcaagtggttggtaccctaacctgaactattaaccaaatcttggatttgcattgcttacactcctttcaatacagcaatttgccctttataagagaaaaagatgctgacattcaggaaagcagcaggggaagcagtatcctgttctctacattttgggcacattagaaaagtggttcagaaaatcctgtacaagacccawagcgctaccctaggccgaagtgagtccacaaccacacattcggatactccaaaaagatgccaagtggtccttttcattgacaggactagcagtatcactccaaatggtaaaatgttaaagttgtaactagagaatgtttgatctttttattgctgtttttaaaggcagatgtcctgagtggttcattgtggtttctaccatataaacgtcattttactctactggttacttggctgtcataagacagaaaatgagctgccataagaaaagctgatggaaaaggaaaaaaattacaaatatctgatcccatacccaggtcactgtcttcatctaaggcataatttatcttttccaatgaaatatgtgtacatctcaattaattatccacttaccctctactaatcagaaataagatttggttcagtaaggcggggtgaaggaacaaactcaacctaccaattgctccacatgaatttttttttttaatagaggcagkgtcttactctgtcacccaggctggactgtgcagcctccaactcctgggcttaagcctcccgagtagctaggactacaaccacatgccaccactcccagcwaattttttttttttaagaaacagggtctcgctctgttgtccaggctggtcttgaactcctggcctcagacaaacctcccaccacagcctcccaaagcagtgggataataggcataaaccaccactcccagcctgctccacatgattgataaataacctgatataataatctagacaagtcaatctttgctgaataaataacttccccatgagtaatccttcctatgcccagttttccccaatccttaatatcattgctctttttagactcatacattcattcacttaacaaacataaactgaatgtttaagataaggcaaatactttgtatgactggttttctatttgaaaatagagtgtgtgactatacaaatacatatatacataaaggtacatcaatttatatacattggccctatgtaacccccatttgagaatatttctaagcatgccagctactcaaattcaagtgtgaaggtatgtgtatttgggtgtgtgtgaatgaatgtatgtgagagacaaaggcagacagagagagggaatggataagaagcaagtaaagttacagcagacaaggacatgaaaactcataaaagactcatgataaactgtaaatacatttaaagaaaaagaataacacaagccttcactccccttccctgtgcgatcataatcactgcccatcaacttctctgtccatatcatgtgtgctccctgtgttccttgaaggttatgtataaccaagatctacctttaatgtgtttggcaaaaatatctgtgccataaactattagctgacaagcaattatattctaccttgtaaaagaaaattaggcataaaataaccccacaaaaagaagagaatgactgtttcacaaaagaggcaaaagagatttaaacaagataataccataagtttctatctcaccatccattaattttaaatttgattttgcttcttatatcacatagcacttattcaaaaatagcagaagaatacttctatctatctgttgtcctgtaaaaagaaaagaaaatactattatttgtatttcttgttcaaacactctaaggataaaagtactgttttcaaaaatgatgaggttcctgcagataacatttacccacaggatttgaggcttttttgtgacataaagtgcagagtactttgaggatggttacagatgcaatggcacagaaaaggcttttaactttggctcatttcctctgaccaccatgtctccattctaaattacaacctctcaagctacagatcctttaaaactagcttttaaacyagctttctgtggtatcatcacaaaataagaacactttgttacttgaaaataaaagcacaaaattattggactcaataactgttctcattattgcaaaccaataaacaaggttcaacaagaactcgttttagctattgcttatcaagctgccaaaaaataaatccaaaagaaaccaaagaaaaacctgccttaacaatatagatggtttcttattcataaactatctttaacatcaaaaatggctagcatgtatgccagtgttattgccttgcataacagaatcttaagctaagcactaaagttctgtcattcacatctagaataataattttttttacaaaaactaaaatacggccaggcgcagtggctcacacctataattccaacactttgggaggccaaggtgggcagacaacgaggtcaggagatcaagatcaccctggccaacatgatgaaacctcatctctactaaaatacaaaaaattagccaggcatggtggcgcgtgcctgcagttccaactactcaggaggttgaggcaggggaatcacctgaaaccaggaggcagaggttgcagtgagccaacatcacaccactgcactccagcctggagacagagcaagactctgtctttaaaaaaaaaaaaaaaaaaaaaaaactaaaatactaaataaccccatttttaatagaaatttgttttatgatataacccataccaaatgctacctgctcagccaaatcacttttagagtccacacagccctttatatctaaaagaaaataataaaagtgctaggaaacaagaagtatctgggccagttacccttggttaggactgagaaattagctggcacagacagcaagaccgggaccaaatattcaaccagttggctggggatagtgggttgaggtcaaggagatgacccatacagctgtaaaattaagtataaaaaggggaaattgggcaaacaaataaatatactgaggataatgggagccaggttttctaatgttggagaaggaacctacaagtacaaaaaggggaaggaagaataaaccctgtcgtttggaatcgaggagatcagtgggaacatatatttttagataatcactgatcaatagatagatagatggagatgtatatgtatatatgtacgtacatatatacatgtaatgtacatatgtattagtccgttttcatgctgctgataaagacatacccaaaactkggaacaaacagaggtttaattggacttacagttccacatggctgaggaggcctcagtatcatggcaggaagcgaaaagtacttcttacatggcagtggcaagagaaaaatgaggaggaagcaaaagcagaaaccccggataaacacatcagatctcgtgagacttattcactaccacgagaatagcacaggaaagaccggcccccatgattcaattacctccccctgggtccctcccacaacacatgggaattctgggagatacaactcaagttgagatttgggtggggacacagccaagccatatcaatatatgtatgtacatgcatatatgtacatacatatatacatataatgtgcaaatctgtatttcctaggtttgttcactgaaaagatctagaagcaaagacacctcagtagtaaagagcaatcttagacccagtagcaaagagcaaccttagcatccactaaaagaaaccagaagtctttggtagcgccagggctggggcaagaaaagtacaagataagcttgaaccacaccttttaacatgaggaactgagaacatagcatcgcttttgtggtaataatgcccaaaataacaacttattcataaggaaacatcagataaacccaagtagagaaacaaaacatagctgtactcttcagaaatgtcaaaatcattaaagataaggcaagattaatgaagattccagattgaaggagagcaaagagccagggcagctaaatacaaggcttagattctggacatataaagaacatcattgggacagttagtgaattatgaattgaatctgtgtaatagacggtaatattgtatcaatactagtttcctattttggtggttatactgagattatgtagggaaatgtccttatttttagaaaatagtcactgaagtactaagggagtactggggcatcatgtctccaatgtactctcaagccaaaaaaaaacttcaaaataataataatgtgtaatggtaagaggagagggagggcagattgagagagagagagagaatatgataaagcaactataataaaattttaatattgaaaatttgagtgaaaatcatatcagttctttgtactattcttgcaatgtttctacaagctkgaaatcattgtcaaatgattaaaaaacaaagacatgtttggccttaaatgcccatataactattaagaaaaaccttaactctctatgaagggccacaatctgctctgaattttgaatataaaaaagtatgcttgtgctagaggctaatacagcctatataattctaagggcactaaacaaataaaataaggatgttaaaaggtgtcttgaacgtgtctaaaatctgtaaaatgttaattctcacagaatacttggcttagaaagatgatgtacattggggaattataaatataaggataaaattgcaaaatttccctgatagtcacaaaataagacctatgtagacaacagtatgcatcacccagatcccccttcaaagaagcactcactcatggcccatatatgggcagtgcagtcagtagacagccgccaggtcagtagacttcaacatcgccacagctgcagagaaccgccctcccttggggtattcgacatcctcagacagggcaggggtaacttgagacaactctgaaggccacactgtctgagggccccactggcttgtctagggttctgtcaggcctgcctcacagtttggcttcctcccctgctcaatcctgtatctttcttcttcctttccccagggatgatccctaaaatacatctcacaccccaaactccatctcaatgtctgcttctagggaacccaacctgccacaggacctcttttgtgacttgacaaaacatagcttgatataggcacattttataattttgtcttgtgagtaggtaactttatttcctcaaaagacaggtataaatttttttcaggtaaattctgtctctaaatctcatccatttaccttctcatgcggtgtgacagaaaaagtgtactttccccttttcatgttagccaaatataaaagataatcattgtttaaacaacaaatttccctcttatggtccattagctcctgctgcttgttcctgtagtgaaatagaaatacaacaaacgatttccatggcaataggtaataatctagcaaatgtgaatttccgacttagcaacagaacaaagcaagaagaaattatggaactgcagtggggctaaatttcaatttctgtgtatttttagtatcacattttaaaacaaaaaagcacaaatgcagacacattaacacgtaactatgaagaataaaattctaattataggataaattcaagagacctcaataatcaacctgtaatatcactccttacttcactactaaaatatattcaactaacataaaacaccttaccttacaaatttgagaattcttacacttatytgaaagcctattatctactataatagcagtcccaattactgatatatcctgttattttcatttttagtaataattataaacatggcttattgctaatatgtaaacgaaagatgttcaaaggactaaagaatctctaggaagcacaggaatagaggaactggaaagactgcaagcatcaggagcagctctcttgctgatactccattagtcaaggctctccactcccttgtggaacatgcagcaccctgtacaggctactctctagtctgcacctgctcttcttcccacccctgagcttcacactcaccaagaggggttgttttgttcccacacttattaccatttcttcttgttatagtaattatatagtttaattatattattcacaatctgatgaaatatgagtgcagaaaggattatcgtatccaagaaagtaagtacaacgctttgcaaagatttgataaagatgaatcactaaaactatgaacaaattagatatgggcaatgttagactgtggacagttacagaaaaaataattcaaatctaggattctacactcagattgctttgtaagtgtcttaaatttctgcacttttaaataacccaacgtgaaaattataggtaatgcactgccttcgttttatacagaatgactatccaaagatgcaaattttttaaaataaaaagcttcagccttatacaatcagaaaaatggcaaaaagacaaacaactacgataagagtatgagttcaaggaaacctgaatagaggtccttaatatatgacaacacgaccatacctctctttcagttgcctccactctccagatgggattcctgccctctgttctaaaggatgacattgagcactgcccgccttgtccttgacctcagatatgcacttcttcaatcttaggctaactcttctcggttggcaacagaggttcagaaagtgtctccttgcttcaatgtcctctcctacctttgtatatgcaaattcttcattaccagcttgattgcatttatatccagcatacagcaatgtgcaaactatattttctctttggctattagcgacccaaggaggacctcagacaasaacatacttttagccccaaagtcacatgggcaatcacatttccaatcttttaagcacccttccaatggatatactgtctaaccaggaaaaagattaactggaccagtcaagtctctttttccyattctagccacatataaatgatcaatgcccccacccactggaaatgtacagaagctacaataaaaagaatttcctgcccagggccaagaatttatagatttagattctaaagcatctgatgtgactacttttttattttattgccttaacttccttagctacaactgaacacacttcccatcaacctattacttctttacctccctccagttttcctggcctttaactcaatgcctctcctaagtatgcttgagctgtgtttactcaagccacctctgacatcaagtgagaagtgtttttccttctaacaccaaccaattctgacacaaactcgaagtcccataattcaattaattctgataataacaaccaggagttagcatcagawtttttagtgctcagtcccacaaatcaaggtccctaggttacacacacttctgtccaacttggctataaagtctgaggtgggagggtcctcccctcacttcaggttcagtaatttgctagagtggtcataaaactccaaaaaacactttacttaccattactggtgcattaaaagtaccacaaatgaagagccagatgaggaggtaaatctagtgaggtctggaagggtccagagcatagtagcttttgtccccatggagctggggggtcccacccacctggcatgtggatgtgttcgccaattataaaagtctcagaacccaagcatttaggggtttttgtggaggctgcattacataagcgttattcattaaatcactggccatcagtgattagctcaatctccagcccctttgccctccccagaggttgtcacatgagattaaaagtcccaagctgctaatcaaggcttggtctgttgggcaaccagcctgcaacctgaagctttttaagggcccaccaagaataacctcactagaacaaaagatgctctcatcaccctaataactcaggaaattccaaggatttctgaagctctctgctgggaactggaaacaaaaaaagaaatatctttctacactactataatgctttaatctcttttttccactttttcacagatcttacaagtgaatagccagttacttgttccctggctctgcaacagctctcctcccattaccttttgtaaaaaacttgtcccatttctctttcccttccttcctccttcctcaagttttgcaccaaacaatgtgcagaatttagaacactgcatattttcaattaaattactctattgtctgctgtgctcagggaatatctgcagtctgtaaactctgcatgctaggaagagctatttaatcttgctcctgacattttacgtaggagggaatggtttacaggctcagtgtctctagaaagaacactccccaaggaacaacgtatttatttctcaatgttctttttctgttttactcttaaaatctttcctaccaccatccctcacgcccaagagtacaactttgaaatctaatgtataaaactagcagaaattaaagtttatcctatacttacattaaaagctactcctacttgaagatatgcagacccctccaaatccttcttttgattctctgctcacataagtgggttttatgtacgtgtgtttttttccacaaaggagaggcccaaagatagccaagagatcaggattggaacagtttcttaacatcatattctcacattttcaaaatttcctcctttattagtgataaactttttaaaaactgatttcaaaataggaaacagttgttcatcagtctgctagtctcactttcaccaatcaacatatttcattgatgataatataatttttaaaatattttatcatctctggaatcaagatatatcttacagtcgataatatcatagtttaactgacaatatttttgataaagtacatgaagaaatactttatcataaatacataagacaaagataaaataaatgacacaaagatgaatcttaggtttgataaatatattaagttcctctctcaacagtttctggcttacctcagatataacctatgtaaagcatttagcattaaatgtagtataacagattttcattgctgccatcattgatgacatcaacatcatcaacatcatcatcatttctaaacaaataacaaaagtctcagaaacaaatatgaatcaagttagggttctgatgtgttctccttattctatttcttttctgagtgccatttttgtttgtttgttttctatcctaattttctaaatttttcatttgtccccatattaaaaaactgtaaacactctgatggggttatgtaaggttgtgctaaatgacttagctcagagtattcaagccgaaataagttagttctttcatctcaaagaaataagtaaataaataaagtaataaagttctttcatctcaaagaactttaaatatccgtccctgtcactagctaccaaatcaaaaacctaggaatctcattggaaaatagactataagacaattccatggttatgagttttaaaagataactctaatcgatcatcctttttttgtacttattttttgtatatttgtaaaatagtagttacatgaagcaaatartatcagtgtaaggcccattcacttttcaggctactcgacatgcagaaatggtggccattgatcaggtccttgattggtgtcatcgaagtggcaagggtctttctgaagtatttgaacacactgttatatgtcactgtggagctgtgcattatgtgtgcagctgttcgccacctgatgagtatcctttgacttcatgagttaatgtcttgtaccattcatgtgaacatgagagtggccaaacatatagcgcagcaggaagcagagggcagctgtgacgggactggccagcagtggttaggatggtgaaaacactaagaagccaaaggagkcaagagtagtcagacagagcaggtgtggccaattgcctcaatcatctttttctttcaaccaaaagtatcaagttatattttctattttttcttccacatcactcttctaccctctgccatttttttctttctccataaatggaaacctaaaatgtatttctaccataattagaaagcaatcaataaaaaattttagtccaattttgttcgtgtctccacacattactacatgaactcagttttactttatactgtattataatcatttgagcaaaatttctttatttcttgtaaatgaatgtgctagtataagaaatatctacattttaatgaaaatcatagtacaggtacaaaatttctaaaagtgagaaaatgaagcaaacacaatacagctttttggtacttttacatatgtaatctttctttattctgctgttgatagtttttgcctttcgcccatttaagtaagttaattgaaagcatagtataatttaatctctattgtactaaaaatacacaactatctatagtaatattattctgccacattctcaaaaaaactattgggcattaattccatctggactctccactaaataagcattagtaaacaaatttacttaaactataaaattcatattactgaatttgcatatatccagagtgtctgaagaagagaaaacaaacatatgagaaaaagctcatcatcactggtcattagagaaatgcaaatcaaaaccacaatgagatgccatctcatgccagttagaatggcgattattaaaaagtcaggaaacaacagatgctggtgaggctgtggagaaacaggaatacttttacagtgttggtgggagtgtaaattagttcaaccattgtggaagatagtgtggcaattcctcaaggatctagaactagaaataccatttgacccagcaaacccattactgggtatatacccaaaggattataaatcattttactataaagacacatggatatgtatgtttataaagacacatggacacgtatgtttactgcagcactatttacaatagcaaagacttggaaccaacctaaatgcccatcaatgataaaccggataaagaaaatgtggcacatatataccacggaatactatgcagccataaaaagaataagttcatgtcctttgcagggacatggataaagctggaagccatcattctcagcaaaccaacaaaggaacagaaaaccacatgttctcactcataagtggcagttgaacaatgagaacacatggatacagggaggggaacatcacacaccagggcctgtggaggctgtggggcaaggggagatatagcattaggacaaatacctaatgcatgcagggcttgaaacctagatgatgggttgacaggtgcagcaaaccaccatggcacatgtatacctatttaacaaacccgtacgttttgcatatgtatcccagaacttaaagtaaaataaaaatgaaaaagaatagataaatatagttagcaaattatatgtatatatacaatactatcataacaatatacaatgctagtctgtagtttgtaactttttctcataaaataaatgaagctttagaaaacatttttcactgggtgcggtggctcacgcctgtaatcccagcactttgggaggccgaggagggcggatcacaaggtcaggagattgagaccatcctggctaacacggtgaaaccccatctctactaaaaatacaaaaacaaaattagctaggcatcgtggcaggcgcctgtaatcccagctactcrggaggctgacgcaggagaatggtatgaaccagggaggcagagcttgcagtgagctgagatcgcgccactgcactccagcctgggcaacagagcgagactctatctcaaaaaaaaaaagaaaacatttttcactataagaaaataaaatcacttataatagacatatttccaatatttacattctctgtagtcctctagtcctttatctagacatatatactatatttttcaaatactggaattatagtatacatcattttgtaacttgcttttttgtttgacaatattataggagcactttcaatattcatagtcttcgaaaacatgatttttgaatggctgtatgaatattccatcatttgtaaatattgtagttgattttgctaacccaccactattggacagttactaccataataatgcagtagcgaacatccctttatctttgctctggtctctgatttatgtcttggaaaaaaattctaaaagttgaaagtaccaagtaaagacatgtaaatactgtcaagccttttgatgcctaccaccaaactgttctttctccaatatctataaaagtacagtttaaagaaaccatcaatattgtgttgctggtatgatggatgaaaaagtatgtctcatttaatttcatgccatttcatttacaagtaagattaatcactttaataaattcatttttcattttcttttttgaactatctgttcatgacctttgcctattatccttcggatgtatttgctttttattactattttgtggctgttttttatacaggagtgatatgtttgatgttgcaaatacttttccaggttctcattcactttatcatttcatgtttttttgacatataagagactttcattttgcataatcaaatttgttaaacttttccttcattatatgtccctttggttttatatcgaggaaggcctttctgggcctactatgaaataattcatttatactttcttctaagtattttatgacttacatttaatattatttctatatttaacccatctgaaatgcmttttgtatacagaattggagagagctaatcatgtttttttcagacaaaagtattttaacacgtcaagtttaaaccataaacacttttcggattaatttttttccataagtttttggggtggaggtggtatttggttacatgagtaaaagaaaactactgactgatatccttgatcaacacagatgctaaactccttaacaaaacactagctaacctaatccaacaacatatcaaaaagatagtccaccatgatcaagtgggtttcataccagggatgcaggagtagtttaacatacacaagtcaataactgtgatacaccatataaacagaattaaaaataaaaatcacatgatcatctcagtaggtaagaagtattcgacaaaatccagcatccgtttatgattaaaactttcagcaaaaatcgacatacaagggacatacctcaatgtaataaaagccatttatgacaaacccacagccaacataatactaaatggggaaaagttgaaagcattccttctgagtactggaacaagacaaggatgccccctcccaccacttcycttcagcatagtactggaagtcctagacagagcaaacagacaagagacagaaataaagggcatccaaatcggtaaagaggaattcaaactgtcactgtttgctgaaaacatgatcatttaccttgaaaaccctaaagactcctacagaaagctcctagaactgataaaagaattcagcaaaatttccagatataagattaatgtacacaaatcagtagttcttctatacaccaacagtgaccaagcagagaatcaaataaagaactcaaccccttttacaatagctgcaaaaaaaaaaaaaaaatacttaggaatacagctaaacaaggagttgaaagacctctacaaggaaaactacaaaatgctgctgaaagaaatcacagatgacacaaacaaatagaaacacatcccatgctcatggatgggtagaatcaatattgtgaaaatgaccatactgmcaaaagcagtctacaaattcaaagcaatctccaccaaaataccaccattattcttcttcacagaattagaaaaaacaattctaaaattcatatggaaccaaaaaagagcctgcatagccaaagcaagactaagcaaaaagaacaaatctggaggcatcacactacctgatttcaaactatactgtaaggccatagtcatcaaaacagcgtggtactggtttaaaaataggcacatagaccaatggaacacaatagagaacccagaaataaacccaaatacatacagccaattggtcttcaacaaagcaaacagattaatttttttttgacccagtatctctttctgttgcccaggctgcagtgcaatggcataatctcagctcactgcaacctccacctcccagattcaagtgtgcttcagccacctgaatgcctgggattacaggcatgcaccaccatgcctgcctaatttttttatttttattagagacagggtttcatcatattgcccaggctgatctccaactcctggtctcaagttatccatcagcctcagcctcccaaagtgctgggattacaggcatgagcctctgcacccrgcctagatgtattattaatgcattattattaatgtatcctttcatactaacaacamctaagttgtttttaacatgtactaacatttcctacyttttaaacatgtagtagtatatcctatcatttaaacaygtactagcatatcctatctttaggctcctttaatatagagtcaaggttctccttctccttgcttcccatgctaccagcactataaagtaagagaatcaacaaaacatcctatattataaagagtagtttgacgttttggctctatgtagaacacatcaattatatctataatatattaatttaaaaagtgaactcaattcctctagctattgaaaaagatttgccccagaagtcttttctgagtccttagtcccactctccatctgaatgtgatacctctcctgtgtgttttccaagacctctcaacgtatctgatcacagcccttatcaccttatatttctgacttactagtcagtcccccaactaaaccaaaagaatttcagaagaactatgtctcagatattttatcactatcacctagctcatagtaagcagtctgtaaatatttgttaaataaatgaatgagtacaagactacaagacttttaattcctttcaggcctgccagtgactaacgattgcaacagtgaataagtcacttaacattttagactgtggtgaacaattcagaaatcagtaatttcttagcacaaagatctcttaagatttttcaatctcaaaattctatgatgacatgacctgtatccccagaaaccaattttacacaccctgctgctacatctcttgcttggtaatattcccctatccccaccagtctgacccttccagacttccttgaccttctccagcctaccccactgtccatttaaaatgttctcaccttgtgctccttaaggcttttctatggatcagccatctatatctgtagtctgaacaacagtgcattttactgtaccttccccatgttaaatttgtgtgtagatatactgcatggcttattcagaagatatcggtgatgtgaaatgcttaggtgtgaggttaaaaaggagctctcaatctcttgcttaccccatagacttatctttggaaatgcgtatgacattagatcaatgactgcatcctactctaaaacaaaatgcctcaagagtattagtattattttataattttacaacttttcttgtttccataatgatcaacagaagtgacatgattttgcagtcatgccaaaaaagaaaaaaaaaaggattatactgataatctcttcccaaatatattctggtgaggaaaggtttattttgttgctttttgctttttgtcatttccttgctctagtttagttgtttttaatatttccataaatgttgggagtaagtttactttggacagaacagatttgcttctatttttaagaatttgagagcatgtggtgagattgtttatcttgttgaaataccccaaaaactcagcctcttgatctaaaatgcaatccaataagttataacatgagttaaggttaatctgtaaataaaatacaattccaatttgctagtgaatacttacctgtaaatactaaagacagtattttaactcaaacattttctgattgccaacctattctaagtgttatgggggagcaaaggcaattaaagtcaattttctgcctccaaggagtgtattctgattaagacagacctgtgcttaactaacaataacacaaggcagaatatggttctttaaagaaaaacaaatcctgtagtagcaaaagaattttagcattaaaataatatatagataagtaggattaaaactgcagttctaatacctttccaaatttcaatgtacttctttgaataagagaaaaattaaccagtcatgtcctttccaaagaaacactacagattacacatcctgtagcactctggaattatgggctctgactggtagtagactactacttctgttcaagaggttctttaaatattcacgaagtctgattgagaaaaatgttaagcaagtcatggtcatactgagcaattcaactggtaaaccacggactgcatagctacgttcaacatcagatggaaggaataacttgagaggctattaaggaatagaattaggaagactataggctcattattaaaccattatttatttagcactgccaacattccaaacacagtggtaaatgcaagactggtgaatacaatccataaaaatattctctgagagactgtttatcatgttataaattcaaggttttaaaaaaataatagaagccaggtagggtggcatgcatctctagtcccatctactcaggaggttgaggcaagaggactgcttgagcccaggagttcaaggctgtagtgagctacgactgtgcttgtgaattgccactgcactccaggctggaccacatagcaagaccccatctcaaaaataataataataataataataataataataataataatattaagttaggaaaaagcaatcctccattcattcacaatgtacatgtcctatatattcaaattaaaaccaagcaaaagccttctgttctgaaactaactttctatgaaacgcccaacttgtattcccagcaatatcaagtttccttattcatctctatagattacctcatataatgaaatggaatcatccttttccagaattaagatgctgcttttatcactttacttgctcaaaaaccttaaaagctttcatttacagatgggcacggtggctcacgcatgcaatcccagcactttgggaggctgaggcaggcagatcacctgaagtcaagagttcaagaccagcccaggcaacacagtgaaaccccgtctctaataaaaatacgaaaattagccaggcgcagtagcatgcaccagaagtcccagctactcgagaggctaaggcaggagaattacttgaattaccaggaggcagaggttacagtgagccaagatcgcaccactgcaatccagcctgggtgacagagtgagattctgtctcaaaacaaaacaaaaaaagcttcaatttactataaaatcaaattaaaaatcctcaaggtggcattcaagaatctgcatatctgtatattaaaactatttcctaataccttcacaatggaaattttctgttccagacacattgccttcatagtccacgaacacattatatatatttatgtctatttacatctattctttcttttctttctctgagacagggtttcactctgtcacccagtctggagtgctgtggtgcaatctcggctcactgcagccttgaccccccccccccacccmgccaggctcaggtgatcctcccacctcagcctcccaggcagctgggactacaggtgcaagctaccacgaccgtgatatggtttggctctgtgtccccacccaaatctcatctcaaattgtaatccccacatgttgaggaagggacctggtgggaggtgactgtatcacagggcggtttccccatgctattctcgtgatagtgagtactcacgagatctcatggtttaaaattgtttaataggtcctcccccctcactctctctctctctctcctgccaccacataagacatccactttgccttccaccatgattgtaagtttcctgaggcatttccagccatgtagaactgtaagtcaattgaacctyttttctttataaattacccagtctcaggtagttctttatagcagtgtaaaaacagamtaatacagcccaggtatatatatatatatatatttttaaacagggtctcactttgtcacccaggttggtgcaatcacacctgcaatgttggtgcaatgtaccaggttggtacaatcactgcagcctcaagtagtaagtattcaaaatatatgttttgtttaaagggggtcaataaaataatctaagtcaactattttatttattacacatgaagaatcacaggaaaaaagttaagcagctattccaaattacatagtttgaaagctacatcccaaacacaaaacccaatattttttgggttgtaaagaatcctgcagaggattgtgaaagggtagaagtgaggatccctttctgtgtaatattgttaaagttgggatcctttgattacatgatagcttgaattctaaatacagagatgccatcagttaaatataaaataatattggggcaaaattagccatgccacttggaagtcttttgaaaggtttgtgtttatttttctaacctatatattactgtaagaggcatacttggaacaacccccccacaaacacatatactaattaactaatccagcagcggcataacacacagggagttttatcctttatgaaggcctggcatatgcatcacatttaacacagccctagctcacagtactttatctacttggctagaaaacaaatggccacagaaattcatgctagtcaatcyattttttatatattttggagtaaaaaggatgtaaattcatctgagtagataactagcatacaaagaattcaggttgagtgtgctacaattaaaaatggtcaccacaagaagctgaaatattaggagtgttcaggggcattactgagagtcttcaagcaaaaagggttttcccarctgtcactgtaattacaatgaaaaaattttacttcctaaggatttcatctagaacacattatacataacagaatatacatgcattcaaatgtaatagacacataaggaataccaattttgactaccttcttcccacaaatcacaagcgacctctgagcacaactctcaagacttttaaatgctttctggaactctttttccatttagaaataagtaactacatacaacagttcacggaaaactcaaccacttaactatttcagtgaaaacaggtagaaagaaagtctataaactatactttttatccatttgaaaaaatttaaatttggaaaggaatcacttcattcttaaggtcccaacaccctaaaaataaagtttattctaaattttcacatttgtcaaagacaataatatcaagcagtagcccacaattccctaaaggaatgatgtcaattggtatttcttaaattaattcagtgacctacagtaatgtgagttcttggtacataatgtctgtcagtaggcaatacaaaaatttcagaatcacttctggtgtctgaactccaaaatgcaacccaaaaaatgtgtctaaartagttccttaattcctacttcaccttgcatctgttacttatagcaacgtcagaaaaataaaaattacaccaggtgtagattgctagaactacagttctacaaattaaatacagtacaaatttaaccaagacttctggtaacatacaatcagttatctttctgagctaagacattacaagtctgtaactccttttaccgactatggtttagtgagtttcacatgtgcttacacagctcatttttagttacttactagacaatgtgcaatggtgtacttttataaaaatttcaaaggtctcaagaaatggaaatactcaaatttaaaggatttatctgttatctctgaactctctttctctgcttttactgctcccaagtatacaggcaccacgaacacagagaccagctaaaagttcaggaacagaaaattccaactacatcatcttaacaaataaccccacacattatagtttaaaaatagcatatttgaaaaaaatgcactaaaaattattattagaacttcacactcaaatctctaaaaagttatgaacattttatattgtaatacacataaattctaaagaatatcaaagtataatatcagagaaacaatatgtgtaagattataaaagattagagtattatctgtttggatttttacatgaattatttatgcacttaaaaacatagttgaagtgaggagaaacataaatgataacctaatcacattctctgagtttccctcctaggtcactggctgctccttctcattttcctgactcccattattcctaacctctaagtgttggactaccctaggaggggtataggacttttgtctttctctattcactgtctaggtcacaggtcagtaaactctacctgcagaccaaatgtagcttaccacctattaatttttataaataaagttttattggaacgcagccacacccattttcttaattattgkctacagctcctttcacaatacaaggtwaaaattgaatagctgcaacaaggactagatagtgcttctgatcctttacagaagaaaaattgccaatctctgtctaggtgatctcactaaggtgcatagctttaaatataatgtatatcctgaaaattacccaaattctatcttcagtcctgactcagatatgaatgacaacttctctacattatatttggatgtcttataggcatacaaatttaacatgtctaaaaggtaaaatttgctttctaccacccctgccactcctttgcctcttgtatctcaatacacaatttccattcatccaattgcttaggccaaaaacttcagaatcctccttgattcctctatttctctcatactccatatcccagccatcaaaaaagtacatctttaaaatatatccagaatctggccacttctcagccactccaatgctaccaccctaactcaagtcacaaccattttcacctggactattgtagtagcctccttactgggtccctatttctgttcttggtcccttacactcaatttttacagagcatctagagtgatcatggaattccattactgaaaacacttcaaaagccatgcaaggtgtggcctcttgttatattctacctttcctccctcttactgactctggtcactccccacatggtcttttactgtcaagcatggtcctgccttagatctttgcatttgctcttctgtctggaaaagtttcccccaacttatctaggtggtttaattcctcattttattcaggtctctgatcaaagattacctcaagttagaggtcttccttaatcactctctctaaattagtgactcctatcaattctatatccctgttaataggtggattccctagaaaacaggctctaagattctgggatttgcatgcattttggggagtgcccttaggaacaacatctgaaagggagtgaaggaagcaggacaggcagagaaagaagctgaattgcagtgtggttctaacagaggtttaagccacaggaacctctgcagtgggtatagtttttgaaaattatcccacatgaggaaaagagacagggtctttgagccgacatatacataatgaaattcccagtatccccagagttggggtgtaaccttgagtaagacacataaatatgtgttttagggaaatgcaaattaaatccaaaataagatactactttacacacactaggatagctaaaatcaaaaaagataaaaaataacaaatgttggtgaggttgtggggaaaatagaaccctcatacactgctcatgggaatgtaacatggtacacacagcagctccggaaaacaggtttggcagtctcttcaaaagttaaacataaatatatcacacaactcagcaataccatacctagaaatctgcctaagagacatgaaaacatatatctacggaaagaattataaaagcatattcatggtattattcataatacctaaaagcaacacaacataaaagtctagcaaatggtgtgtggattaacaaaatgaggtgcatctaaacaaaaaataatattcagcaaaaaaaagaacaaaatacagatacatactgtaacatggatgaacctcagaaacattacactcagggaaagaagccaacacaaaagaccatttattgtgtgattctttttaaatgaaatatccagaaggggaaaatcaatagaaatacaaaatagattactggttgcctggaggtaggggtaagaaataacagtaagtgcaaatggccatggggagtattttcaggatgattaaaacattccaaaattggattacagtgatggctgtacaaccctatacattcactatatcatcaatttctatacttagcatgagtgaattttatgaaatgtaaattacatataaataaagacataaaaaagaaaaataaatattactggctgattcttaaattgactaataataatggtgacaataactactactcactgaaaatttgcttaggttcaagaattgttctgagtgcttcatttgtattaactcatttaatcttcaacacaatcctacgaagcaggaactattttattcctatttcagagatgagataactcaggcatgggaaaattaaatagcatgctcaaggtcatagaactaaatatatattaattaacttataaaaataaaacattctaccttaaatgctaagcaacagcacttatctaaaacaaaccaaaaaagtagaagataataccatatgtgtacatacatggtaagttccctgtaagtagcgtatttaagattttccaataagtgaccaacttgcaacacttctgattatctgtatagccattgaaacaagtaataagtataatatttattataagacagcttggccagtacttggtgcatattcagtgagagacttaattactgtagacaaatataaagaatgctcatgatctaatctactgaatcactatgttcatacagacacagaaatatcactatgggtacacataaatacaactttattctgcaacagtcacgcataaacacacacacaaactctaagtcacacaatctctataataaagatttttctagtgcatcatrtcacagaactgcaagcatatcattttgttcctgtaactgaaatgtacaatgggacaagatgagatgacagtgtgttttatctttttcatatgaaagttcagtaataaatttcacatggcagtaagccaatatgaatgaaatacttggagatactaacttctcatgtatctaccaataaaacactctcaaatttacagatacccctagaaaagacagctgataaccacattgtatgtagttaatattttttttaaatatgaaggcatataaatgatcagcaagcctgacatttagatatttgacaacaatgtattttaagcagtctaataaaacacaaagcacagatgtagaggaaggaagatatgtaactaaaaccacattcaccttcaattcctttgcagactagcactgaaaaacctacatcagcactttctgtctagatgatatattgatacaaagctagaataaaaatggtgataaaaagtaccatttgtaattgaaaataaatgttgctaagtgctgacaagcttctgtcagttaaattgtttttatttagaaatattttgcatttcctctattattcttaagaaactttgtaattaatttttgttccaaataatgtttttgtgtattgattacacaaactagtaatatttacatttaagacatccatttaaagttgaagaaaccatttcataatagaaagccaattcctacccttaattctcttaaaatttaacgtccacctagaaagcaatgcatcagtaataaatttatgattcaatatggttatcagcccacagctaaaaatttgcagatctgtataaccaagcatattaaaagtccccatggataacatataaccatgagtaactctcataattcaacatgcactacagtaagaaccattacaactgcatgttttcattgttaggtcccaatccatttttaaaagaagctgtacatgtacatcaccaacttgcacatacatgcaagtaaaattaaattacctaaagggtatcttctgaaaaacctgagagttttttttaagacatcagtataaccttggttaaataatcttatggtctctatataaagatttgaaatttctgaaaataaaaacatacagtaacataaagcttgcttctaagagtagccagattcaatattcagatttagaaaaattacattcattaaatttaagtgaaacaaataattatgctgaacttctacaggattgccctcaaaatcctatacataactagaaaagtggacaaaatatataaagctatttcagatagtggaccaatggcagaagaggcatgtgattattaacaaaagggaaacaaatcaggtgatatctaagactgcccctattccaacctagatgcaaagtccaaactgtggtataagaatggggaactcagagcctcatggtccaaataagttgagaaacagattagagtttgaagacactgggatggctggaatttgtgggacatattaaagataaaaagaacgctatgcagagattggcataagaatactcatgaggctttgaataggaatctgtgctgcatagggtgaaactccaagcagccaagtgaaaaatagcaggaaaagatcaatttcaggggagttataaagtgaacaattccaagaatgaagagcccttgttgttgaatacccagagtattctgtagagactccagaaagctcatgccttagtagtgagtctaaactagctctaaagattaccctagatcatccttgaaaagcacaaaaatagccttgaaatgagcaggctgatctgcaaataatttaaatgcctaccaaaaaagtggagggtggtggggagagagaccatttaaaagaaaaaccaaaatgtaattagtactacattagtaaccaaaaagaaaaaccaatgtaaattagtatgtacattgttcaaattcagctgaacaatgtaaatactaatattcaatgcctaacagtgaaaaaaaaaattagagacagacaaataaaagggaggaaaatgttgcccacaactaggagaaaaatcagtcaataaaaacagatccaattaacaaagataacaaaattaacattaaaaggccttaaaacagctattaaaataagttcaataagattaaagacttaaaggaaatatgaacataacgagaagacaaagagaacatattgagaatcaccaaattaagtgtctaaatatttaaaaatatttttgatacgaaaatgttgcagataagacactacagaaaatatcagtgaagctggaaacatagcaacataaattattttaaacaaagtatgaaggaagaaaatattttaaaaataaacagtcttggtaacatgtgagggcaacaacaatctaacatttttataattcaagcactaaaataagaggaaagaggtcaagaaaatatttaaagaaaacatgcccccaatttttctgaatttaataaacaatatcagcctacaaatccaagaagttcaacaaagcccaggaagaataaagaaaaaccatgacatgatataatcaaattgctaaaaaaaaaaaaaaaaagtaacaaagaaaaaaatcttaaaagtacccagaaaaaaaggcacataatataggagtaaatataataacacatgtcttgtcagaaattatgcaagctggaaggaaatggaatgacattcttagagtgctgttagaaaaaaactgtgagactaaaaatcatacagccagatcaaatatttttcaaaaatgaacacaaaggcaaagatgtcattaccgayatacccaggacctagccaaagcccacaacacccctgaaattctcaagatcaagttcaaaaaaaggggtccccgtgaaagtgaccatcaagatggcaccacctcaccagacctccttggagctcttcgtgtacctgaacraagtcacgggcaagcacggcatgggctgtattgacattatggagaactgcttcattagaataaagtccagaggtatctacaagaccccagcaggcaccatccttcaacaggctgatttagacatcgaggacttcactatggatcgggaagtgcacaaaatcaaccctgagtgtaaatctgtccaccattgcatcaccaagtcccaggagcaaatggaaggaaaagtgyaggtgcccatcttcaagggccaggtgcacatcctcagccaggagtctctactctctctctrcaaggaggagctggtgagcgtcaacgtgcaggggaattatgagccaatcgatgccaccrgtttcatcaacatcaattacctcagactgaaggaatatcattatttccagagtaaggtcactgycaaatagacccatgtacaatggagacctggggcctcctcactttgcagctctcccaactacaggtgctaattgttgtgacgatttgtaattgtgacttgttctccccagctggcagaatagtggggctgccaggccccaactttgttccctgatctccctgaagcctgcaaaattggtcatcaaagggaagggtggaggacaaatgcaggagtaagctataaaatgacaattaaaaaataacaattctaaatatttatgcacctaataatgaagcttcaaaacacatgaagtaaaaactagaactgaaaggaaaaaaaagaaacccataataatagctggagatttcaacactactctctaggtaattgacagaacaaagagaccagaaacagtaaggatataaaatacttcagtggcaccatcaacaagttgacctatttgatatttacagaacactcacccaacaatagcagaatacacataatttgctaatgcacgtaaaaaaattaactaaaatagggcatattccaggccttaaaaaaatggattgaaatcactcaaagtactttctttgatcacaaaggagttaaaacggaaatcaattaaggaacaagtcctgaaatatctggaagtcaaacaatataattctaaataatcaatggaaaaaagaaaccacaagggaaatttaaaaacatcttgaataaaatgaaaacataatataccaaaatttgtgggagaaaactaaagtactgctcagaacagtgtttccccaaatgtgctacacactaaaaatcacatagggagtttttaaaaatcccattgtacctcatatcaatttaatcaattaaataaaaatatctggggatgggagacagaattattaatttttaaggattccccagacaattccaattggcaacaaaatttgagagccactggtttagaagaaattttttttttaaataaacttctacgttaacaaggtagaaaaagaaaagcaaattaaaatcaaagtacatagaagggaagaaataataacaagcaaataatcgaagaaataaaaaacaaacccaaagctgctttttggaaaacatttttaaatgataaatagctagatgaccatgggaataaaatagaaaagacacaaattaacaaatatcagaaataaaaaaggagatattatccagatacttcagacatcgaaacaaaaacagaggactattgtgaacaattttataccataacttggataaattaaatgaaccaattgattaaaagacacaaattataaaactgaatcaaaataaacccctcatcaatctcaaaagtttaactcataattaacaatcttcccaaaaagaaaattcctggaccagatggtttcactggtcaattctatcaaatatttaaggaagaattaaaccctatacaaactttttttagaaaagaaaaaaagaagaaatacttcccagcttgtttatgaagccaccaagcctccaaatccagatagagattacaaaawaaaaataaaagacagaccaatgtatctcatacatatagacataaagaaagatctttaacaaaatattaccaaatcaaacccagcaatataaaaaaaaaatacatcatgatgaggtttggcttatccaggaatgtgagatgggtttagcatccaaaaatccaatcaatgtaatttaccatattaacagattaaaaaacaaaactatatgacaatatcaatagttacagaaaagcatgtggcaataatccctcagtcctaatttaagaaaaaaaaaaaaatctcagcaaagttgaaacagaaagtgtgccagttatcaacctcttgcctgtcagctccaaatttacccttccctgtcctgctttgtgatrtgggagctagaccctgtatcttttctttgccagctgctgtaacactaaattttgttagcagagggtgctggagagaacaatgcaagatgaaggagcttctctttctgcttccgatatgctttgttctcctgtttttcttatggcaatcagcatcacaaagatacccagtgatactcacatcccagcaagttgcagcagcacctccataagcaacttcccagccagttccactagcatcccaagtggtttcctggcaagtcgcaagatgttccaaccagcagtttcccggaaagtttcaaaaacacccccatgagaatctttgcagtgaacttgaccccctcctcaggggctggctcacttccaccacataccacagaagcaagaagagaataaagtacactagaaccagaaagagaagccccttcctcctgttcccctgcaggaagattccgagtgaatttcaatgtcacctctgcaggcaatttcccagcaagtctcaaaaagacccagagggtagcttcctgaatcaacaaactagggtgcatccatgtaatcaaatattagtgagtgatttaaaaaatcataacctataaagccatggaaagacatgaaagagtcttagccagcatactgctgaaagaagccagtatgaaaaagctacatattgtatgatcccaattaaatgacattctaaaaaagacaaaattgtataaacagtaaaaagaacagtagtaggagtaatgggcaggaggaagatagagatgaataggtaggagcatgggatttttagggaagtgaaactattctgtatgatatcacaatgatggaagcatgacatgcatttgtcaaaatccatagagctgtacaacacaaagaatgaaccctaatgtatagactttagttaataatattgtatcaatattggttcatcagttttaacaaatgtacattaatgtaagactatcataataggtgaaactgtgtacagggaaaaagggattatatgagagctctctacaaaaatataaaactgcactaaaaaatacagtctattaatttttaaaaaaacacattttcaaattttcccatagcttcctgtagtgggcagaattctaaggtggcatcccagattcctgcccactggtgcacacactctgaagattcccttccccttgggggtgggtagggctttaagtatgatagttttcactcccagtatgatgttacattatatgacaagcatgaaaagattgtattaacgtaattaaagtcccaaagcagttgtcttcgagtttgtcaaaacagagatgattctgggagtccttaaaagggagtgggtcctccttgaaggataagcctcaaagcttgagagagcttttcctgttggtcttaaagaagggggcctgtataggagccatgtagcaaggacttacaggaggggacctctagagaccgagagcagtctccagacaagagctagcaagaaaatgtggacttcagtcacacaatccccaaaaactggattatgccaacaaccacatgaacatgaaaaaggatcctatgagatcccagatgagattatagcccaggggagaccttgactttagtatataagaacttgagcacaaaattcagctatgcccagacttttgccctacaaaaagtctgagataattaatttatatttttacaagccactaagtttgtggcttattaaacagcaatagaaaactaatacagtctgttaccttcaggttgacaaatcaccaacgtcaacaaaataggctaaaagaagacattttggaattttgtacattttgacaattgaagtgaatttcatagtcataaaaatttacttattttgcatatagttggcatttgatattttgaaaagccaaattataactagtatatatgacacaaccacagcctatagaaaaaaattacacacctgagaataaaatgcaacaacaaatctatcaggaagtaatttaggaataaaattctcaatttcaaagaaatttcacataacaacttaaaattctacttaggattttacaaattgctaccaagtgataattaaatgtttttaatttttaaacatatacaggttttaaacaacaacaacaacaaaaaaacagaaaaaaaattttgaaacctgcaaataaaacatatcatgagtcctaaatttctgaaaagagatttgcataattttccttaattgtacactttaaaatggttcataatattatgtgaacttcatctcagttttaaaaagttaatctgagcattctaaatattaattataattattacatgtagatctacggagaacatctattcccagtttttgtcaacacccaactacgcaaataaaatcaacagcacataaacagaaaatcatcagctatcccattaaagtacatattgaaactttatatacgatgcttgaaaggtcacctgttcactgcattaaaaatttcttccccgtgctaggcatacaatgaataaaatatgcagtctttcagaaaactgtatgtaatgatatgtcatagcagttcacacaattgtactaaacaatatgcatgctttctgtttttctatcaattaaatattcaggaattactgtcaaatgccatgtcatagcatgacagagatttascccagattttgaaatctggtttgaaccactagaattagcaaactaagcagcaacataaaatattaagcatgtcaaccaaataatccactttccctctgtctttggagatgccttattaaatttcctaagagaaaaataaaagtacttcatgtaaaaagttttaacccctgctttgaaaacacatattttagcccatcatataaggttttttaatatgattggttctaataatcatatttttaaaatcccaaccagaagaagcactttaaaagtattttttcagtttaatatgcacaggtctgccagcataatatttgtccataattaagaaaattgcttacttgctcagtaggcaatacatgaatcatatgtagtataaaattagaccacaattgagagtttaatccctaaacaacatccaaagttaagcagaatatggtatgatacataatacctttaatataattaaatgagccttaattttacataaatatattaataaattagatatatactatccaatacagtaaccataaactacatgtatctatttaaactgaaaataatttaaagtacataaaattaaagattcactttcttagttgcactcaccacatctcaagtattcaacaaactaccatattaggtagcacagatatagaagatttctatcattgaagaaacagtacttatttgacagagttgagtttaccataaaactcatcataaagcttaagcttcaggcctcctcatttgaaaatgtccctgcaggtaccctagcaatgtgtccatgattatatattttagtaaaatttgtaaaagtaagatactttgccaatgaaatatctttctccacttccycttcttctccaccaatctcctgttgtcgggtggagggcgtcacagtgagcaacctggggatcatgcaaagggtgatatattcagtttgggtgatacattcagaattggtagcacattgtttttagtgggatatatgtaagtggttcttggtcatttctatgtgtaattagtttaccatctgttccagtataggaatggcttctaggaatacatccctttcccaactgtgctaactcacatggggtcctgatatgaaggttcgtagtcagaggtctatgaagacccctcaatgtgtaacctctgtcacgaatgtgtcccatggcaacgagaactaaagatttgtggcaaatgggagagaagcagagactgaaatttatacagccagaagctactctgtggaaaattcttccaataaggagacatgaaatagaataagcagataattccatttgtaatcaatgcctagtcaagttttctcttattaggaatagagttgatagtgcatatacaattataaatgtagcagacatttcttttttctttttgatgggactcacaatgaaatagaacttttcagacactgcgtttgcaaagcccaaatctgcagctgttctataaatactatgtctgtgagtgaagctgcacagtttatacagctcaattatcaataataaaaacaaaatcttcctaaccatagtacaggaaagtccaatttatctttctaaatctataaaaaattatattataaagtcattgtcatctgagaggggctcaaacattatgtatcctatagatgtggaaaaggtagtttaaaagtgtgatcagcagctatttttccaaatattattatgataatgtcactgaccaycttttacgaaattgtaatcagttgtgatttcttttctcattctaaatacatattgacttgtatataaatttgcatctgtaattttgtattttttttaggagggctgcctccaaatggtctgcctcctttcaggtccccaataaaaccttgatctgaccctgatgctagaaaattatgtcttgattaaaatatatattcactaattagtaatctctatgtattcctttcttcatcctagatgtactgcaatatcaataacccagtcacatcattgtcactgaattctaggatttaaaagggtaaatttgaaatacgtcccttctgctcactctggacctaatctgatatcttttcagccttcggtacaaaaagctcacacctcactagcactaatacaaatgtcattcctagtaattaggttacactgagtgcctttgagctttgcagtgctactgccagtgaagttcttaatacatttacagtcatggttatttaaaccactaaggcttttctttgagtaaacaatatattgatcaaatcaaatgctagcctgacaataccaattaatttaagaaaataaaaaatacacaaaaatttctgttatctaattatattgaagagattgctcctaaaacaaacattkgtaaaaccacctttttgtactatgaaaattatatttgtacacatacaaatataaaaatgcccaatagctaaatgccacttatgcaaatagtccctaagttttctttgatttacagtttatttcatactctttatatttcattaagccatccttcaataaactattttttcaatattgtgttgcgaagatattctcagcctgaaattacatcaaataaattacaaatcaaatttctgaaagccactgccataggtggaaatcaaatcaaatgcctagcttcacataaatggttaaagctttaaataaattgcatttatataattgccttacttgctgctgcctcctacagctgtagaataatgttattccaatatatgaagaatatattggcagacaagactaaaaaatttygaattattaattaaaaatgggaagttttattaaatacattaaagaactgaatttagacttggaatacatatattcctgtagctctgtttctctgattaggccctgactgttacacttttactaaagattttttttaaaaggaagaaaaaatttcttacctaagaggatttggagctgtgaaaggaaatgggccccaaaatcactaagctaaagggaaaagtcgatctgggaactgcttaggacaaacctgtctcccgtgctattcaaagtcactcctctgctcactgaaataaatgtgtatctgattgcctcctttggagaggctaatcagaaactcaaaagaaggcaatcatttgtctcttatctacctatgacctggaagtcccctccctgctttgagttgtcctgcctttctggacagaaccaatgtttatcttacatatgtttattatgtctcatgtctccctaaaatgcatgaaaccaaactgtgttctgaccaccatgggcacatatcgtcaggaccaccggagaccttgtcacaggcacgtgtcctcagccttggcaaaataaactttctaaattaactgagacctgtctcagattttcagggttcacagarcaaaatgataatttactgcccttactcaaaaaatattgtcctattcatagaaaaagaaaatgataaggtggtttccagacactggaagtagtggagaagtgttacatagttattgcttaatggatacacggcttcagtttgagactatgaaaacattctggaaatggatagtgaggatggctgcacctgcaccacaataagaatgtatttaatgtcattgaactgtacacttaaagatggttaaaatggtacattacatgttatatatattctatcacaataaaaatgtttcaattgttctaattatatttacatttttatattcattttttctgagattcagcctgaattgaaaagtgcttcattataaataatagaaattaaatacttaagttggtcattcaaactcacaataaaatggagaaaagaaatcaagttttctaagttgtgactctgtgagcactttactaccacacaaattgagagatcacaaaagaaattccgaacttctctgaccaaggacagttgttttgaaacaaataaaaaaactatctgtacaataaaggtacaggtgaaactttcttttttttaaacttcaagttctagggtacatgtgcacaatgtttgcaggtttgatacataactatgcatgtgccatcttggtttgctgcatccatcaactcatcttttacattaggtatttctcctaacgctatccctcccccagccccccaccccccgatagtcccccgtgtgtgatgttccccgccctgtgtccaggcgatctcattgttcaattcccacctatgagtgagaacatgcggtgtctggttttctgtccttgtgataatttactgagaatgatggtttccagcttcagccacatccctgccaataacatgaaatcatccttttttatgactacatagtattccatggtgtataagtgccacattttcttaatccagtctatcaatgatggacatttgggttggttccaagtctttgctattgtgaatagtgctgcaataaacatacgtgtgcatgtgcctttatagtagcatgatttataatcctttgggtatatacccagtaatgggaccgctgggtcaaatggtaattctagttctagatccttgaggaatcaccacactgtcttccacaatggcagaactaatttacagtcccaccaacagtgtaaaagcattcctatttctccacatcctctccagcatctgttgttccctgagtttttaatgattgccattctaactggcatgagatggttatctcattgtggttttgatttgcatttctctgatgaccagtgatgatgaccattttttcatgtgtctgttggctgcatagatgtcttcttttgagaagtgtctgtttatatcctttgcccactttttgatggggttgtttgtttttttcytttttttttttttttttttgagacggagtctcgctctgtggcccaggtgggagtgcagtggcgcaatctcsgctcactgcaagctccgcctcccgggttcacgccattctcctgcctcagcctcccgagtagctgggactacaggcgcccgccatcatgcccggctaatttttttttgtatttttagtagagacggggtttcaccgtgttagccaggatggtctcgatctcctgaccttgatccacccgcctcggcctcccaaagtgctgggattacaagcgtgagccaccgcgcccggcctgtttttttcttgtaaattggtttgagtactttgtagattctggatattagccctttgtcagacgggtagattgcaaaaattttctcccattctgtagrttgcctgttcactctgatggtagtttcttttgccatgcagaagctctttagtttaattagatcccatttgtctattttggcttttgttgccattgcttatggtgttttagtcatgaagtccttgtccatgcctatgtcctgaatggtattgcctaggtttccttctagggtttttatggttttaggtctagcatagaagtctttaatccatcttgaattaatttttgtataaggggttaggaagggatccagtttcagctttctacatacagctagccagttttcccagcaccatttattaaacagagaatcctttccccatttcttgttgtttttgtcacgtttgtcaaagaacagatggctgtagatgtgtggtgttatttctgagccctctgttctgttccattggtctatatctctgttttggtaccagtaccatgctgttttggttactgtagcattgtagtctagtttgaaatcaggtagcatgatgcctccagctttgttcttttggcttaggagtgtcttggcaatgagggctcttttttggttccatagaactttaaggtaccttttccaattctgtaaagaaagtcattggtagcttgatggggatggcattgaatcaataaattactttgggcagtatggccattttcatgatattgattcttcctatccatgagcaagggatattcttccacttgtttctgtcctcttctatttcattgagcagtggtttgtagttctccttgaagaggtcaccacatcccttggaagttggattcctaggtattttactctctttgtagcaattgtgaatgggagatcattcatgatttggctctctgtttgttaatggggtatagaaatgcttgtgatttttgcacattggttttgcatcctgagactttgctgaagttgcttatcagcttaaggagattttgggttgagacgatagtcttttctacaaatacaatcatgtcatctgcaaacaggaaaaatttgacttcctcttttcctaactgaataccctttatttctttctcttgcctgattgccctggccagaacttccaacactacgttgaataggagtggtgagagagggcatccttgtcttgtgtcggttttcaaagggaatgcttccagtttttgcccattcagtgtgatattggctgtgggtttgtcatagatagctcttttaattttgagatatgtttcatcaatacctagtttattgaaagtttttagcatgaaggggtgttgaattttgtcaaaggccttttctgcatctattgagataatcatgtggtttttgtcattggttctgtttaagtgatggattacgtttattgatttgcatatattgaaccagccttgcatcccagggatgaagcccacttgatcatggtggataagcttcttgatgtgctgctggatttggtttgccagtattttattgaggatttctgcatcgattttcatcagggatattggtctaaaattcttttttgttgtgtctctgccaggctttggtatcaggatgatgctggcctcataaaatgagttaaggaggattccctctttttctattgaatggaatagtttcagaaggaatggtaccagctaatctttgtacctctggtagaattcggctgtgaatccatctggtcctggactttttttgtttggtagcctattaattattgcctcaatttcagagcctgttattggtctatttagagattcaacttcttcctggtttagtcttgggaggctgtatgtttccaggaatttatccacttcttctagattttctagtttatttgcgtaaaggtgtttatagtattctctgatggtagtttgtatttctgtgggataggtggttataccccctttatcattttttattgtgtctatttgattcttctctcttttcttctttattaaacttgctagaggtgtatctttgggacacatttaaagcagtgtgtagagggaaatttatagcactaaatgcccacaagagaaagcaggaaagatctaaaatcgacactctaacatcacaattaaaagaactagagaagcaaaagcaaacaaattcaaaagccagcagaaggcaagaaataactaagatcagtgcagaagtgaaagacacaaaaaatccttcaaaaaaatcaatgaatccaggaactggttttttgaaaacatcaacaaaattgacagtgaaacttttttaagtaaaaagatagttaactatactaatggctacactgagcatgataattattgcagatggtcaatggtaaagcaagtgtagttgtttcagctgtagagataacgtaattaaatgaacagtatagacatctgatcaactttgaataatcaatcttatcacgtataccaacatgccctgttcttcacaaaatccattcacaaattctaggatgtatgattttttaagtgaattctgattcgttagaggttaatgtttacgaatgcaaacagcatctgtagaacctgatttacggtaaggtactttctactcatcacagtatctccaccgtttaacactgttacaacgcaagtgcacaacaaatatctgtttaagtagccaggaaggaaggagagaaggaagaagagaatgagggagagaaggaagatagatgggtggtttcggtagattcttaaaacccatccgttaatactcagtgtttggctgtggtatgaataaaagagagaggctagagactacaagtaattaacagactgcgagggccagtgtcccagactaagccatgctaatttttagatattactcgtgacttttttctctactgacaaaagctcagcatttaaatatattaggtgacacatatatcacaaggtacctgaataacagctgggattcattacatctgtataatcatctatgcatgatgtatagccatgctacttaaaactatatcttaaatatgaagactcttaacagagtaatttcatacattccaaaatatttctcttcattgtacattaattaaaactatattttcaacattttataataaatcattctaaaagccaaatattaagcaattctaccacaaaaccaaaacatttgaaacaatcaccatattttgactttgcaacttttgtaaaatatgtggttatttgggtcacagaattgtatcacatttgttgactaccaggcaaaattctttgacaagtgactttcaggtttacacagtctgctgccattatagcaattatatggcataatggaatgctagccatgtgtacttctgacattcctctaaatccaggtcattagtcattacatgaagtcattttaagtttccttcatcaattgccctctgtagttttccagctgtcatttcatttgttagtttcaactgaaatgtaaatgtaatagatgtaaatgtttatttagggattgcttcccctttctgtttttcacataaacacttacatacttcgattccttaaacacaacatgttttggcaaaactaatctatagtaaagggggaaaagtgagaaatgtggttccctgtgaggtgtgggagcagaaggtgactgagaaggaccatgagaggactttctgggatgatgttaatgttctgtatcttgatagagattagggttacacaacataggcatatgttaaaactagcaaatgttcacttaagatttatatacactattgtatttaaattttacctcaaaagaaaaaaaaactgtaaactattcttgaactctagttaacaatacgcatgttgaaagtatttagggggaagtgcctatagtttactttgaaatgcattataaataaataagatggactgatggatgaatagagggattaaaatatagatagataagataacagaaaagtgataagatatgagtggtgagtatactggtgttcactgtaattgtcttttgacttctctgtatgtttgaaaatttccataataaaatacattttcaaatttaaaaagtcatttctccaaaatccttttaattttcaaattcactcagtaaagaaagaggaatcagcaagtgttcccaaacattttgaaccataatcttagttacccacctgctggatcattcttagatcatttcttagtagtcagaaaaactggtccaaataattaagactcgataaaaatcttgctaaattaatcaaacatataatttattcatctactccttcatttattccacaaatacatgtcaaagacctctaagaagcagatgtctcttctaaatgctacagaaaaagagaactgaattgtaatacaacgtgatatacattaactgctataaaaacacgacagggagggcattttcgggaccatgaagggtgagtaaaattttgccagattgggtacagggagcagaaagttcatcccagggtatggactatcatgtaggtaaccttataatacataaactttgttttacagctaaaaaaggtaaattatatatttctggtagttgcttctcaaatatgtcaaaataatttaaaataaatatatgtacattaatccctcctttttgtatcttacatactgattttagaagattctgcaatcttttcaatcaccagtataatttaggttttgcttattcaccactaaatcacagcaacatgtatttcatttataataattaaaggtatgttcgttcacatttgatggtattaccactgagaggttttttgcaataacatgttttccctggaactcactttgggaaacaattctctaaagtcttgaaatcccaagagtgcatactcagggattagaaaggtttccctagaccaggatgcaaataaaaatgcaaatctttcacacagcaactctgcccccaaaaaactgacaaaggacaaatatcaaagtactgtgtaaattgtctacaatctatttagagactttaaatatgttatgttgtcctttttaaggcatgtggctggtcacatttcctttgatgagtagtttgcctttctaagcaacctaaccaaaattctggcatatgtgagtttactgcaatattatttctttatgatctgcaagatgtggatatcactgtctatctcacatgcttaacgtgaaggttatatgagatttttttaaataatgaaagtcagtgtttggtgtttaataaatagtagtaattaacaataaaaaatatttacccatatacctattcaggcaattgtacaaccatgcttttaaatttgagccaggaactgaggtgagccagaattcatcttattttatgagtatagttacaaagtcctaactcatagtctcattgcattactgatcactttaatgtcatgataatttttcatttgctccctttcagatccaaactccttacttcactgatcacccaagactggtactctttacggagttcgctagcgaagaccttagaattcttttatcatttatctgttagtggctgaggatagaaatatcagtggaccttcacctcaaataatcctctaaaaaaattcccagcgactgagttgggccagaagttcagactcaagatactttgtaatttgtttcaaattattttctgtaggtactatcaaatgatccctaagccaaatgaaatgctttgttctaatgactgaaaaaatcagttaagaaaggcaggattaatattagggcacttcttaggactggacagtgcattataaaagaaaatgaagaacattcagagatccaagagaaaagagacttctagaacaaaaaataaatagaaaacctgatttcatttgttagtacaaataataatgactgtcactatttaacagaaaactacattaccatattgaaatagaaagaagtgagaattcgaagctataactttgagatgcaattaagtgatccaactcaataaaccttaaacagaagactgtttctattcagagtgccagaacagtgtgaatctgggaacaaccttggaaaaggatcttgactatggatcagatattaatctccatgctatgtttccattatgccaaaaaattaagcactcttaatatttacgacagtattaaattataaatctagccccacatatcaaaaaattttaaaatagttacatctttaatgtcattaagagcaaatacagagcctcaggctcagttctattaggtaagttcatatcactgacattttcttcccatgaaacacattggacttaagatatagctatgaatataattttgctggaatactaatgatattcattttaaaatctgagtgctattagtacccactttcaatttttcatctttcatgatacgctcctggtacaagtgtagtctgtgtagcaacacactcatgctgtacacctcattggctcagtcctgtcagcagattgagtgcatttgaatctttatgttcctttttttagaatttgcaatattctaggagagtgattttctttattgttcccttatattgtatttcacccttacagaaaatgatagagtaattagaatcttattttccaaataagtcactctgtcttctttgtctaaaaaatatattttctgtttcacatatagatgataaagactaaagcagtagaaaaatgaataccaaaaatgtcaagagaaatagggggtttcaattgtaattttttaaagtaataaggactggaaaaaaattctatataaaaattgaatgattaaaaatactaaaatggttccttactgccctaaataaaacctttacaagatgcttcatatgtgaaataaattaagaatcaattcaaaagaagagaaacttttttcagtaaaatgggtaaaatcttttaaaaaccttttaaaattttctttgatacagtaactttctaaagaaatgttcaagtgtctatcaattttactttcacgaaagaaatctaactctgctttactgacaatgcagtttattttaaaactagagcagtacaaaaaggtcacaaaaagactttctgaaatataaaatcagtctaagataagcaaagctgaaatgactatctataccacctttccaaacctattaatgcttcaaactatattattatacaaccacaaacaaatatgtacatactctctactagaacatctccatagttgccgtgaatcattctttcattttccataagtacttacaaagctccataagtacttacaaagcagtatagtattcaattttaaaagtgtaaaaataaaatacacagagttttgacaaatagaaagtatcagataaaacgcgaatgaaggctagatggctaggtggatgggaggtgggtggatggacagatacataagtagttggatgaataggtgctcaggacatatgaatggatgaatatggtgctttctatcaaataaaagaacatgcaatccttttttcttctttcattaagtaacacttgtatattaatctaggtgttgcccatgagcttcaagagcagcttcatgaatctctgggaactgcatgtagggaaatgcatgttgatataggtacacacatgtggggcctggggaagggggtaagcatgcctataggcatcaacacaaaaaaaggccccttcttctaatctccagaaacaattaacctactcttttcaaaaactctactttgccagtctttcatctttcagcagaagaggcaaggcctgagtgaaaagtatgatgcctcctctggcttggcagcctaaacaaacaagctttccacacatagaccagggaagcttccacacccacatctggtgctaggcatggttcctgaattcaacagcaggataatacctgtccactatgtaataaaggcactaaaagttagctttaaaaaaaaaaatcaacatagaattcctgatttcatatttatgaaatagcatcctttcacaatagcacagaagaattaagtaaacaatttaaagattcacatctaattgagctccaactcagataaaatagcctgtgtttcttaaattgagactcccacaactaaattttgcctttcaaaggcaaaagaattttgaagaaatggtatcttcctagagatccctttggggaacatttttacaaacacttttcatgtgggcaaaataatttcactagtttgtttattggacatattggcctgtactttcacaaatgcagacccaaaaatcaaaatcagagmtggaaaagggcaaacagtattatatagcaagtatgcttggataagaatcaaagtagaaggcttagggtttggctctaaaattagccaactagacatgagtttctgagcaagaatgatcataatgtagtttagttccctttcagtggctattgccacatgtatacaaaacaaacataaggaaatgcatcatattcttaagatactcatcctctcatccatctggttttatctcataaattacaaagtcctatttgaaattcttattataatattaaaattgggaaaagagcaaaattagagaatacataaggtaaggaatattgaaaattaataacaaagtaaagaaatacgtttgaattttttcacaatttctacaatatgcctcctgaataacctaactgaaatatgtctgacaactacagctatggaatctaaaagtaacagaatattattattttccttcctggtaaaaaaataaaaagcatataaatttatacatttttaggaaaagctaaaaatgtcatcaagtatgccttttagccttctttaacttcttttcaaaaatctaaatttataatagatctatagttctgagactatataatcctgttagcctaaaaagagataaataattataaataaaattattgtatttccttgatttatcagactctccatcctcaaaccaaaatccttacttaattaagcagggcaaatataagcaatcacttagaaaagtggtgtgataactattttaaactattaatctttttaaaagtaagcctttttaggagatctaagtagtacactcaaatattgtcttggatgctgggtgcacaaaataagaacctataccagttcatgaatatttttattgttttctcttttacccagggagagaaatagacaaaagacactattaaagttaaatataggctgggcatggtggctgacatctgtaatcccataactttggaagcccaagggaggtggatcacttgaggtcagcagttcgagaccagcctggacaacatggcaaaaccccatttctactaaaaatacaaaaattagtcagacgtggtggtgagtgcctgtagggccagctactcgggaggctgaggcatgagaatcgcttgaacctaggagacagagattgcagtgagccaagatcacgccactgcactccagcctaggcaaaagagtgagactctgtctcacaaaaaagttaaatacactgtgcccttttttatcttgaccacaaaaggtctccatctcagtaataggtatcatacttgcagtacctccgtggcatatgcccaggatttatagatcttttgttagataacaaaatccagataaattaagagagaaaatgcaacctgtggtacaataatacccatcattaatgaacttcggactttcccagtatttcactagtcagtgtaaagagaaattgttgtacgctcatgagcaagtcagtttgcttggtctcagttttctcatacataataaagtattttacacattccttttattaatctataaactctataagcaaggatcatggtaccctaacacccgcccaacataggcagccaaaaaatatgcatgtgcagaatgcaagatcacacaggttttttccagccaactttatcttcaattatataattttttaagtctaatatttgggtggataggtccataatgcatattaaaacaaaaaagagggtggttagggccacaaaaatgtggtagaaataattgaagatcacaaaagaagaaacaatttcctagagttcaagtggcctccatcaaactttaccaaaaccctaccaaaagctctaattctaaactttataaaaaagtcatagaagtataatttctctttcagaagtaatggcttttgttgttgttgctgttgttgttgtttctagttgagacctttgctgaatgtctaagaattggaaaaacaatgaagtcaaacctttcctaatttctattttaagatatttatactttttccaaactttcctcagatttaaaaaaaaaattgtattctttggaaaacaaaaagttagtactcagaaattcatatttggtaaaccactccagtaaattaattgaacccaaagagggggtcatgggaactgcaacttgaagccagttcatcagaagttccagagacctagacttgagactggtagaggaggaatagggaaaggtgcagtcttgggaactatgccctaaacctgtgggatctgacactatctccaggtaggtagtgtcaggactgaattagaggacacccagctggtgtctgctgcttggagtgtgggggaaaaaaaaccccacacatatggtcacagcagtcttctgtgttgatgattgttgtggtgttagagtagaggaaaaacacagttagagagagttttccttaaacaaatggtgtcagtgaagcaagattagctggaacaccatgatcaggtgggatttatcctagggaagcaaggatggttcaaaagacacaaattaataaatgtgatacattgcataaacagaattaaggacaaaacccatatgatcatctcaacagatgcagaaaatgccttcagtaaaattcagcatggcttcgtgataaaaatcctcaacaaactaggtatagaaggaacatacttcaacataataaaggccatatatgacaaacccacagccaacattttacttaatatggaaaagttgaaagcatttcctctgagaactggaaaaggacaagaattcccactttcaccactcttactcaatatcatactggaagttctcactagagcaatcaggcaagagaaaatattcaaaggcatccaaattggatgcctcttcactgatgataagatctagtatctagagaaccctaaagattccaccaaaaaaaccttagatttgataaatgaattcagtaaagtttcaggatacaaaattaatatacagaaatcagtagcatttctatacaccagtaacgacctagccaagaaccaaatcaaggaggcaatcccacttccaacagctacaaaaaaaaagaaaaaaaaaaacacacctgggaatatatttaacaaagaaggtgaactatctgttgtattagtcaattctcatgctgctatgaagaaacctgacactgggtaatttataaagaaaagaggttcaattggctcacagttctgcatgtctggggaggcctcaggatacttacaatcatggcagaagacacctcttcacatggcagcaggagacagaatgagtgccagaaggggaaatgccagatgcttatctcatgagaactcactcactatcacgagaacagcatgggggaaaccaccccagtattagtccgttttcacactgctgataaagacataccctagactgggcaatttacaaaagaaagagatttaattggacttacaggtcaacatggctggggaagcctcacaatcatggtggaaggcaaggaagaacaagtcccatcttacacggatggcagcaggcaaggagagaaatgatgaggaagacatgaaagcagaaaccccttatcaaaccatcagatcctgtgagagttattcactacaatgagaactgaatcatgagtgaaactgctcccataattcaattgtctcccaccatgtccttcctacaacacatgggaattatgggagtacaattcaagatgagatttgggtggggacacagagccaaaccatatcagaccccacgattcaattagctccacctgtcttgcccttgaaacgtgaggatattataattcaaggtgagatttgggtggggacacagaacaaaaccatatcatctctttaagaagaactacaaaatactgatgaaagaaagtgtagatgacacaaccaaatttttaaaaatcccataaccatagaatggaagaaataatattgttaaaaatgaccatactacatggagcaatctacaggttcaacacaatccctattaaattactaacatcatttttcacagaattagagaaaacaatcctaaaattcatatggaaacaaaaaagaccccaaatagccacagcaatcctaagcagaaagaacaatgttggaggcatcacattacctgactttaaattatactacgaggctacaggaaccaaaacagcatggtacaggtataaaagtagacaggtccatggtatagaatagagaacccagaaacaatgccacatacatataactaactaatcttcaacaaagtcaacaaaaatatacactgaaaaagttctatcctatttaatacatagtgctgtgaaaactgaatagcctagccatatgcagaagaatgaaagtggacccatacctgtcacaaagtcttatrttctggtctttggattaggcaatgattttatgaccaagtcctcaaaagccaatgcaacaaaaacaaaaatagacaaatgaggattaaatacagtaaaaagcttctgcacagcaaaagaatcacaatcagcagagtaaacagacaaactacagaatgttttccacaagaaaaaaaaaaaataaccccattaaaaagtgggcaaaggacatgaacagtcatttttctttttgtttttttgtcttgtttgttttttgtttttttgttttattgtttttgagacagactctcactctgttgcacaggatggagtgcagtggcgcaatcttggctcactgcaacctccacctcttggattcaagagattctcctgcctcagcctcccacccaggattacagctgggattacaggcgccttccaccatgcccagctaatttttgtatttttagtagagacagggttttaacatgttggtcaggctggtctcaaactcttgacctccggtgatccacccgcctcggcctcccaaagtgctgggatttacaagcatgagccactgtgcctggctgaacagccatttttcaaaagaagacaaacaagcagccaacaagcagccagtcatgacacaaggtgaaaaatgctcaccatcactattcatcagagaaattcaaattagaagcacaatcatacatttctcataccatctttcaccagtcagaatggctactattaaaaatcctaaaaacaatagatgttggcaaggatgcagataagtgaacacttataaactattggtaaaaatgtaaattagtacaagctctatagaaaactgtatggagatttctcaaagaattaaaagtgaaactaccattagatatactgatcacacttctgggtatctatccaaagggaagaaatcatcatattaaaaagatgcttgaaattatatctttatcactgcactagtcacaatagcaaaggtatggaatcaacctaaatgtccatcaatggaggatttcataaagaaaatgtggtatatatacaacttagaatactatgcagtcataaaaaagaatgaaataatgtccttggcagcaacatggatagaactggaggccattaccttagtaaaataactcacaaagtcaaatacttcatattctcacttataaatggaggctaaacaatgagtacacatggacatacagagtggaacaatggacactgcagactccaaaaggtgggagggtgggaggtgggtaagggtttaaaaattacctattgggtgcaatgttcactattcaggtgatgggcacactaaatgccaagactacaccactatgtaatatacacatgtaagaaacctgcacttgtccccactaaatatatttttaaagaaattcacaattggacaagcgattttaatatcccaaaatacaggaaaaaaaactatgagctacaaattatagaagcagccagccaatcacagctgccacagcttgggcatctcactttcatttagttagatccaccccgggcaacagttcttccagacccttcagtgttttgggggcatccctatactcctgcagtgggccccattcatcaaggatagcagctatcagaccccctatagatgtagacagccagcctagaatttcctccgcatacttcctctctcccaatcccatcatcttggcactcatgggattttcttcaacttattgccatgcataccaggtgtcctgccagacctctgtggacttcaattagatggcactatgtttgagaggccaaagaagagacccagaattagtaaaagagacaacagagtttattaagggaacatatgtactgggcagtccaatggcggaggctggacaggagaacctgtccagtaagactccagaaaaagcaaaaaatattaaaataaaggatttattacataaattatgtcatatccacttggccctctatttaaaatccattaggatattaaacataaaaaccaacaggcaacatggaaaagctttgtttacaaaaaaaaatgacattgggctggaaggaaatacactacactctaaaaaggtatacttttaaccaaacaatgtataaatacaaaaacaaaatttctcagcataatatttcataaactagaaaacttacataaaaatgtattcttaagtaagacagtacggacttgtctcccaagtctttttttcttacacacacacatacacacacacacacacaccccacacatatatgaatactttttaaacattttttctcattatgtaaaaaatcaaaataaagtaacccaaaaatttttaagccctaaatattttattatacttgtaatactgtcactaagttaaactcaaagaatctaacattaggtcattagacaaaactgcactgtgttaatctgtttgcactgctataaagcaatacctcagactgggtaatttataaagaagaggtttattttggcttacagttctacaggctgtacaggaagcagattgctagcatctgctcctggtgagggcctgaggaagtttccagtcatggcagaaggtgaagggggtgcaggtatggcaagagagcaagcaagagtggagaggtgccacactcttttagacaaacagattttgcatgaacttagagcaagaactcactcattatcatgaggaacgcaataagcttttcattagggatccgcccccatgacccaaccacctcccctaccttcatcattgggggttatatttcaacatgagatttggagcagacaaacatccaaactgtatataacgcacttattcttttttaatgaaaatcagtcaaaatatatctttaaaaaaatacatccacagccagacacggtggctcgtgcctgtaatcccagcactttgggaggccaaggcgggtggatcacctgaggtcatgagttcgagaccagcctgaccaacgtggaaaaaccccatctctactaaaaatacaaaattaaccaggcaacatgccacatgcctgtaatcccagctactcaggaggctgaggcaagagaatcgcttgaacccgggagacagaggttgcactgagccgagatcacgcccattgccccacagactgggcaacaagagcgaaactacatctcaaaaaaaataaattaatgcatcccactgctatcacagtttttaaaaacccaaagtgaaaacaaataactgtgtcagactatctttagcaacaaaacgcaaaaacgataacgtctagaaatatatgtaaaataattttaattataccatttataaaagattttattttttaaattaccagttcttttcattttactatttcttctaaaccagccatctggccgctttcaccttacaatgtatggtatctatttttatctgatatattcctatcttatttattgattatctgtctggcccactggaatgtaaactccttaagaaatttttttatcttgttcaaaacccagagtcactacatacaaatgtgtaggttttacacatgtgaatatcattacagttatgcagtgcacaacctgcagaactgaatatggtaggtctggctgtgaacaaataattatcagacatgtaataaaacgccagagatcttaacagttctgtgtcctccctagtggtgatgcaaaccctctctaggcatgcatgccaggaaaagctgttcctcaacattttcaattcctaaatattctttaacattatgttacacaagcatgtacaaattatttgctctttgctattccatgaaatctataacagcaaaatatttctgaggcagaaaccaactcaacggagttacctattaaaggccaatatgaatgaattataatagcagtaaatttttaaagtatttttcaccaaaaatactaaattgtttactattagacacatatcaattatttttaaaataacatgctgacagtctcaaagaatactgtaaatctatatatcattaatgtaatccatttttatgttcttaaacatctaaaattatagaactacatttttttataaactgtcatctcttttttattaaaaaaagaagatttttatgaaaaacctctgagtttaaattactattatattcaggagtcccacacccactgtttccaaacatagctctttttataacaacttctgacaatcctctagagaacaaaaattcacttttaatcaaagttaaatgctagaactgtttcctgggaaatttaattcaaggtaaacaatctacttgatattgtcttattcacacaaagctgtgttgttagaagaaatgataatgaaatataaaacctttctcttctaggttattgtttacaatctggacaaagctgataggcaaaagaaagcagagaaagccaatgtgaaaggaatgtgtaggattagtcacgcttcttcccagaagatagatgttgaccagtaagactatcagttactaaacacagccctctcattctacacccctaacacaatctcttaaaaaagaaattacaacttccaatctccatttgtcaagkatcttgaatttaaatatacaggtcttcacaaatatgaactaaaattcaacaaagttttgtctactatgtgctggacactaataggataaaaatgactaggaaacacttcttgcctcagaggaactttgcatgcaaatgacaacattacttggcaacaaaagaatgtggacacaatgtgaaatcaagccggggtccagcagttagaatcagcccttccttgactacaccagggacatactactacaaatcattctgtcttataccccagcatccagctatcctctggaaatgcttctccctgaagtttacatccttgcttagctatttcactcatctactccacggctaatcccttcatctctgcttctcagaaatggctctttccaatcctcccttccaatctctactccacaattctagtggcccagtctcaagcttcccctccagtgctctcataccttctcaaagctgcaattctagtcctgaagatctaggcaggggaaactggtactcacacattacatcaaggaaagacctcagaggtacacacaccagtggagataccataggttcagttccagatcacctcaataaagtgagtcacacgaattttttggtttcacagtgtatataaaagttacatttacactgaactgtaatctattagatgtgcaattgcattatggaaaaaaaagtacacactttatttttaaaatacttcattgctaaaaaaatgctaatgatcatctgagcctttggcaagttgtaatcttttagctgtggaagkgtcttgcctcaatgttgatggctgctgactgaccagggtggtggttgctgaagagtgaggtagttgtggcaatttcttaaaacaagacaatgaagcttgctgcatcaattggctcttctcttcatgaaagatttctctgtagcatgcattgctgtttgattgcattttacccacagtaaaacttctttcaaaattagggtcagtcctttaaaaccctgtcactgctttaccacctaagtttatgggatattccaaatcctttgtggttgtttcaacaatgttcatagcatcttcaccaggcatagattccatctcaagaaactactttctttgctgatccataagaagcacctcctcatccgttcaagatttatcacaagattgtagcaattcaatcaaatcttctgactccacttctaattcaaactgttttactgtttccaccacatctgcagttacttcttcccctgaagtcttaaaaccctcaaaggatcaacttcttccaaactgctgttcatgttggtattttgacctcctcccakgaatcatgaatcacaaatcccatgaatcagttcttaatggcatctagaatggtgaatccttttcaggaaattttcaacttaatttgactagatccatcagaggaatcgttatctatggcagctatagcctaacaaatgtacttcttaagtaataagactagaaagycaaaattattccgtgatccttgagcaacaggatggatattgttagcaagcaggaaaacactgatcgccttgtacatctccatcagagctcttgggtgaccaggtgcattatcaatgagcagtaatattttggaaggattctttgcttctgagcagtaggtctcaagaatgagcctaaaatattccacaatctatgctatgaacagatgtgctatcatctaggctttgttgttccatttatagagcacagtcagagcatattcagcataatgcttaaggggcctaggattttcagagtggtcaaggaccattggcttcaacttaaagtgarcagctacattagcccctaacaacaaagtcagactgtccttcaaaactttgaagccatgcactgacctctcctctgtagctagagaactcctagatggtatcttcttcctatataaagctgtttcgtctagcttaaaaatctgctgtgtagtgtaggcgcctttgtcaattatcttagctggatcttctaggtaacttgctgcagcttctacatcagcacttgctgcttcactttgtacttacatgttatgaaagtggtttctttccttaagcctcatgaactcagctctgctagcttcaaacttttcttctgaagcttcctcacctttctcaaccttcatagaattgaaggaagtcaggcccttgctctacattaagctttggcttaagagaattttgtggcttaatcttctgtccaaccactaaaactttctccataacagcaataaggctatttcactttctcatcatccatttattcactggagtagcatttttcacttcattcaaatacttttgctttgcattcacaacctggctaactgttcagcacaagaggcctacctttcagcctatctaggctttcaacacgccctcctcactaagctgaataatttctagcttttgatttaaagtgagagacatgcaactcttccttttacttgcacacttgccattgtagggttattaattggccgaatttcaatattgttgtgtctcagggaataggtaagcccaaggggagggagagagatggaggaactgcaggtcggtggaggtgaagtcaagtcagaacctagcacttactgattaggtcgggcatgttatatgagtgtgggtcatggtgcctcaaaacagttacaatggtgacatcaaaaatcactgattatgataatcatagcagatataataacaaaaaagtttgaaatattgtgaaaattaccaatgtaacacagagacatgaagtgagcacatggtgttgaaaaaatggtcccaacggacttccttgacacagagctggcacaaaccttcaacttgttaaaaaaaaaaaaaaaagaaaacacagtatctgcaaagtgcaatgagatgaaacacaattttttaaaaaagtgttcttgtatacaactaactggaaaataagacagtgtaaaactcacatgaaaagctctgcaagtagtccgggcactgtggctcacacctgtaatcccagcactttgggaggccaaggcgggcagatcacaaggtcagtagatcgagaccaccctggccaacatggtgaaaccctgtctctactaaaaatacaaaaattagctgggtgtggtggtgcgtgcctgttatcccagcttctcaggaggctgaggcaagagaatcgcttgaacccaggaagcggagattgcagtgagcagagatcatgccagtggtactccagcctgctgacagagcgagactccatctcaaaaaaaaaagctctgcaggtaatatagtctgaaatatttatcagaggaatgtccaaagccatacagttaagcgttcactgcaaagtagggattcctttttgggagccacttaccatgctccacaaatcaatctcacaatagtctcagtgtaactacactaagtatagttctacttccttagtggaactgtaggaagttatagccaaaaactattccaggttatttgccatttcaatcattggaagtagctatagagacatgtacttgagaacttcatcatttacagttgaatgattttctagaccttccaaatactggattttacccctttcatgaccctttgctccctatataaactttcatcaatgccagaatattgaatgaaatcaccctgaaatcagccatcatatcaaagatggctacaagatacatctcaaaccttcagaaaatggtctgtgctaatgagaaggccgaagtgtcaaccgcaatatgtctgtataggtacctcaaatgtgacaacaactaacaaaaaaaacactctggtacaaataaactagtactggatgcagctaataaagcacatgatactataatgttaaatacatacactaatagaattttctacaattctctgttacgaggtcctttgtaaatcacaggagagtaagtggttttaagattaaatttgcccatatagttaattgccacttcacagcaagtactgtgaataaaaaatccaaattgagctggtttggacctagttacaaataccatttaaacagaacagaaaaaaagcctctatgttgacagggataacaccaaagtggaacacaggcctcatacaaccatctagaatctctcagtttcaccttcgcttcagacatactgaggatttttcatttgagtttttctttccagagcatgtatcacaaacttcaaagataaattagtaaaaatacacacacataatagcataggttgattttatgttttttaagatgaaggttttaaggttatctcattcaatccccttcattttaaaaatgagaaaataaagctccaaaaaggtaattcacacatggctacatgatatatcagagacaataatttctctgttaattacttatacctctgttcaatacagtaatccaaattttcaaatgcaataagttattttacaagcctatcaaaggaacttgctactttaaagacaactggagtactacgaccactgtcttaagagaaggaaaactgagtgggctggttaaggatgcagaggaggataaaatcacagtcactctttgacccaaaatcaacttaatttccagaatgcctagtaagcttgaagcagcttggtgcagctaagcacaaagagctcaaacatttatcaagtctcctctgaagagttctaaatatggggacatcctagtgtgctgctttacatttcttcccagtccagactgcacagaacagaactctcctcaaaatatcccagaaggacttcagaatccattttttcaaatgttttgacacaacactgaaaaggtgcaattattaaaatatcggaaactattatattaattcaaatatgttcagctaccactcattcttcttcctatttttaaatgtggggatcactaagtatctttaaacttagtgtattttcaattttttttctctacagccacagtgaaaggggtggaaagttaaaaaagaaggaatttgattttttatctattagaaggaaggaaaagtttaggtggcattattatatgtgaaaactgaactgtaaagcatacagtatgtgcatcttcacagggtatataatttcaaaaggtgaaaaatgtttaaatagattttaaaattatttctctgcaaatatcacaaaatattaaaagtataggcttgctatgaaagtatctttaaatgttgtgtttctatttttaaaaaatcactttgtcacttgagagaaataaggttgttactttttttctattttccccattctcatatccttcatgtttttcttcattaattacattgtcctttttctgagggtttaaaatattgtgcatattcatgtatccgctgatacatatatttatggtctagctcagctaatgcattggtgaatatgttcacatagatgtatatgtatatgcacacacatgcacataacaagaaagatggcacagtggctaaggctctttctagagtaagactgcttggttcaaattctgcttccaccacttacaagcttggacaagtttcttaacctctcagtgccataattttcttatctataaaatggggataataacagtaagtgcctctaggggtacaaataggactaaataaagatttaatatttatagtgattataacagcgtctagcattgttaagtgcctgcaaataagtgttgaatttttttaaattattttttacttttcttcattctccttctcttcattttcctcatcgcttctactgctacatctttatcaagtayttaaccatcaaatccagccatacagacaaaatttatatacttcctacactcagaaaataaacaacaggacactgttaaccctgatgataatgaatatacctaaaacaaagaagtaagagagcaaaaatgataagcaagaacagaaactatatggcataatgcagtggtcttcaaattggagtagatatgcccctctaattacagtaggaaggtctgtcccttcctactgtccttcagcataatatctattggagacattacattattcagtgatacatgaaatactttagacttaygtttttcttgtaacagttatatattaatcaagatgcaggtttatagtctaatgttgagccttagaagatttttctaagaaacagctaggcatataaatatatttaaggaaatcaattgctagatctaaacgtccataaaaatttttcctaaaaatgacctatgtgagaaagtgcctctcaagtatgatatcctttcccatctctcttctcacaattatccttctctagatttatagggaaaaaaaagtcgtgctcttacacatccccaagaacactgcaggacattgttttgggcagacaaactgtggggagccaaaaaaaaatgaaatctcatatatttttccactacaggtgctctcagcttaagtgaggaccagctccccaagtcagaaaacatcttaccatctttactccttcctagcaatttattccccctttcctagaagaatgaaaaaaaaatagacacaaacatacatacatacatacatacatacataagtttaaactggtttggccttcaaaggaacaaaatcatacaagatcatgatgaataataaagaagtataaatgtgaagactgagaataacgaaactttaaaggactaatggagaattagaattcaagcacgttctctaagacatgggcattctcaaatatattctaacgttctaggtttcagattacatgatcccttttatggagtgctaaaagggcggagattgggaaatgggattaattaaagaacagggaagaggaggagccaagatggccgaataggaacagctccggtctacagctcccagcgtgagtgacgcagaagacgggtgatttctgcatttccatctgaggtaccgggttcatctcactagggagtgccagacagtgggcgcaggccagtgggtgcgcgcaccgtgcgtgagccgaagcagggcgaggcattgcctcacctgggaagcgcaaggggtcagggagttccctttcctagtcaaagaaaggggtgatggacgcacctggaaaatcgggtcactcccacccgaatattgcgcttttcagaccggcttaagaaacggcgcaccacgagactgtatcccacacctggctcggagggtcctacgcccacggaatctcgctgattgctagcacagcagtctgagatcaaactgcaaggcggcagcaaggctgggggaggggcgcccgccattgcccaggcttgcttaggtaaacaaagcagcctggaagctcaaactgggtggagcccgccacagctcaaggaggcctgcctgcctctgtaggctccacctctgggggcagggcacagacaaacaaaaagacagcagtaacctctgcagacttaaatgtccctgtctgacagctttgaagagagcagtggttctcccagcacacagctggagatctgagaacaggcagactgcctcctcaagtgggtccctgacccctgacccccgagcagcctaactgggaggcagcccccagcaggggcacactgacacctcacacggcagggtattccaacagacctgcagctgagggtcctgtctgttagaagaaaaactaacaaacagaaaggacatccacaccgaaaacccatctgtacatcaccatcatcaaagaccaaaagtagataaaaccacaaagatggggaaaaaacagaacagaaaaacaggaaactctaaaacccagagcgcctctcctcctccaaaggaacgcagttcctcaccagcaacggaacaaagctggatggagaatgactttgacgagctgagagaagaaggcttcagacgatcaaattactctgagctacgggaggacattcaaagcaaaggcaaagaagttgaaaactttgaaaaaaatttagaagaatgtataactagaataaccaatacagagaagtgcttaaaggagctgatggagctgaaaaccaaggctcgagaactacgtgaagaatgcagaagcctcaggagccgatgcgatcaactggaagaaagggtatcagcaatggaagatgaaatgaatgaaatgaagcgagaagggaagtttagagaaaaaagaataaaaagaaatgagcaaagcctccaagaaatatgggactatgtgaaaagaccaaatctacgtctgattggtgtacctgaaagtgatgcggagaatggaaccaagttggaaaacactctgcaggatattatccaggagaacttccccaatctagcaaggcaggccgacgttcagattcaggaaatacagagaacgccacaaagatactcctcgagaagagcaactccaagacacataattgtcagattcaccaaagttgaaatgaaggaaaaaatgttaagggcagccagagagaaaggtcggattaccctcaaagggaagcccatcagactaacagcggatctctcgacagaaaccctacaagccagaagagagtgggggccaatattcaacattcttaaagaaaagaattttcaactcagaatttcatatccagccaaactaagcttcataagtgaaggagaaataaaatactttacagacaagcaaatgctgagagattttgtcaccaccaggcctgccctaaaagagctcctgaaggaagcgctaaacatggaaaggaacaaccggtaccagccgctgcaaaatcatgccaaaatgtaaagaccatcgagactaggaagaaactgcatcaactaaggaacgaaatcaccagctaacatcataatgacaggatcaaattcacacataacaatattaactttaaatgtaaatggactaaattctccaattaaaagacacagactggcaagttggataaagagtcaagacccatcagtgtgctgcattcaggaaacccatctcacgtgcagagacacacataggctcaaaataaaaggatggaagaagatctaccaagcaaatggaaaacaaaaaaaggcaggggttgcaatcctagtctctgataaaacagactttaaaccaacaaagatcaaaagagacaaagaaggccattacataatggtaaagggatcaattcaacaagaagagctaactatcctaaatatatatgcacccaatacaggagcacccagattcataaagcaagtcgtgagtgacctacaaagagacttagactcccacacattaataatgggagactttaacaccccactgtcaacattagacagatgaacgagacagaaagtcaacaaggatacccaggaattgaactcagctctgcaccaagcggacctaatagacatctacagaactctccaccccaaatcaacagaatatacatttttttcagcaccacaccacacctattccaaaattgaccacatagttggaagtaaagctctcctcagcaaatgtaaaagaacagaaattataacaaactatctctcagaccacagtgcaatcaaactagaactcaggattaagaacctcactaaaagccgctcaactacatggaaactgaacaacctgctcctgaatgactactgggtacataacgaaatgaaggcagaaataaagatgttctttgaaaccaacgagaacaaagacacaacataccagaatctctgggacacattcaaagcagtgtgtagagggaaatttatagcactaaatgcccacaagagaaagcaggaaagatccaaaattgacaccctaacatcacaattaaaagaactagaaaagcaagagcaaacacattcaaaagctagcagaaggcaagaaataactaaaatcagagcagaactcaaggaaatagagacacaaaaaacccttcaaaaaatcaatgaatccaggagctggttttttgaaaggatcaacaaaattgatagaccgctagcaagactaataaagaaaaaaagagagaagaatcaaatagacacaataaaaaatgataaaggggatatcaccaccgatcccacagaaatacaaactaccatcagagaatactacagacacctctacgcaaataaactagaaaatctagaagaaatggatacattcctcgacacatacactctcccaagactaaaccaggaagaagttgaatctctgaatagaccaataacaggagctaaaattgtggcaataatcaatagtttaccaaccaaaaagagtccaggaccagatggattcacagccgaattctaccagaggtacaaggaggaactggtaccattccttctgaaactattccaatcaatagaaaaagagggaatcctccctaactcattttatgaggccagcatcattctgataccaaagccgggcagagacacaacaaaaaaagagaattttagaccaatatccttgatgaacattgatgcaaaaatcctcaataaaatactggcaaaccgaattcagcagcacatcaaaaagcttatccaccatgatcaagtgggcttcatccctgggatgcaaggctggttcaatatacgcaaatcaataaatgtaatccagcatataaacagagccaaagacaaaaaccacatgattatctcaatagatgcagaaaaagcctttgacaaaattcaacaacccttcatgctaaaaactctcaataaattaggtattgatgggacgtatttcaaaataataagagctatctatgacaaacccacagccaatatcatactgaatgggcaaaaactggaagcattccctttgaaaactggcacaacacagggatgccctctctcaccactcctattcaacatagtgttggaagttctggccagggcaatcaggcaggagaaggaaataaagggtattcaattaggaaaagaggaagtcaaattgtccctgtttgcagacgacatgattgtttatctagaaaaccccatcgtctcagcccaaaatctccttaagctgataagcaacttcagcaaagtctcaggatacaaaatcaatgtacaagaatcacaagcattcctatacaccaacaacagacaaacagagagccaaatcatgagtgaactcccattcacaattgcttcaaagagaataaaatacctaggaatccaacttacaagggatgtgaagcacctcttcaaggagaactacaaaccactgctcaaggaaataaaggaggatacaaacaaatggaagaacattccatgctcatgggtaggaagaatcaatattgtgaaaatggccatactgcccaaggtaatttacagattcaatgccacccccatcaagctaccaatgactttcttcacagaattggaaaaaactactttaaagttcatatggaaccaaaaaagagcccgcatcgccargtcaatcctaagccaaaagaacaaagctggaggcatcacactacatgacttcaaactatactacaaggctacagtaaccaaaacagcatggtactggtaccaaaacagagatatagatcaatggaacagaacagagccctcaaataacgccgcatacctacaactatctgatctttgacaaacctgacaaaaacaagcaatggggaaaggattccctatttaataaacggtgctgggaaaactggctagccatatgtagaaagctgaaactggatcccttccttacaccttatacaaaaatcaattcaagatggattaaagatttaaacgttagacctaaaaccataaaaaccctagaagaaaacctaggcattaccattcaggacataggcgtgggcaaggacttcatgtccaaaacaccaaaagcaatggcaaccaaagccaaaattgacaaatgggatctaattaaactaaagagcttctgcacagcaaaagaaactaccatcagactgaacaggcaacctacaacatgggagaaaattttcacaacctactcatctgacaaagggctaatatccagaatctacaatgaactcaaacaaatttacaagaaaaaaacaaacaaccccatcaaaaagtgggcgagggacatgaacaggcacttctcaaaagaagacatttatgcagccaaaaaacacatgaaaaaatgctcatcatcactggccatcagagaaatgcaaatcaaaaccaccatgagatatcatctcacaccagttagaatggcgatcattaaaaagtcaggaaacaacaggtgctggagaggatgtggagaaataggaacacttttacactgttggtgggactgtaaactagttcaaccattgtggaagtcagtgtggcgatttctcagggatctagaactagaaataccatttgacccagccatcccattactgggtatatacccccaaatgactataaatcatgctgctataaagacacatgcacacgtatgtttattgcggcattattcacaatagcaaagacttggaaccaacccaaatgtccaagaatgatagactagattaagaaaatgtggcacatatacaccatggaatactatgcagccataaaaaatgatgagttcatgtcctttgtagggacatggatgaaattggaaaccatcattctcagtaaactatcgcaagaacaaaaaaccaaacactgcatattctcactcataggtgggaattgaacaatgagatcacatggacacaggaaggggaatatcacactctggggactgtggtggggaggggggaggggggagggatagcattgggagatatacctaatgctagatgacgagttagggggtgcagcgcaccagcatggcacatgtatacatatgtaactaacctgcacaatgtgcacatgtaccctaaaacttaaagtataattaaaaaaaaaaaaaaagaacagggaagaacaagagaataaaggaaaaaagcagagagaaggcaaggcaaaatgatttattaggaaaggaagaaaccctttcaaacaaagaaatcctacgttttctctcgatatatcactagaagcatatgcaagaaatcaatatatacttttttaaaagaaaggattaagtagaagataagagaagatacacaggtcatagggaataaaaaattaatagtgcctttccacacagacttgaaacaattctggtcactgaagggcagtaaggctggggaaggtatctcccttcctactgtccttcagtgtagtatctattggagacattacattattcagtgatacatgaaatactttagacttatgtttttctagtaacagttacatattaatcaagatgcaggtttatagtctaattttgagccttactttagtttttatcagcaacaatcttgtataatctaccatgactatacatatgcatcaggtttagtaaagcaatttatgatacagtctccatatgtgaaattgaaagccagaagctaactattattttaacaagctgtcaagatatatagagttttgccaaagaaacattgattacactggtcttttgaaaagtagataaaacttagaattccctaagcaaaccatagttacacaaaattgtcctgagattcctatgaagcacatgactcaaatgctaccaaaatccttcataagtaagatttatttccaataaattatatatctctgttttagaactctgataatttgcagcccattttccagtaacatgtttttatcattttctactgctgaataaaaaagaaattaaaggacaaagagaagatcatgagtgaactatccaaattttattacaatcttgaaaaatacacatccgttgacttcctgttcctctgccactaaatctctgtggggaggtccaacttccaattctctgaagtcgcaaggtagaggaaataaaactaaggagcaggttgctatagctctccaattcaaaagcaaattattactctatttaatacagcaatctactataatctcctccaacactcctgatcctctttacagtactcttttctatagtacttatctcctaacaaaaaaatgtacatatttactatacctattatgtcacttgttgctagaaagtaagcttcaaaagggcagggatctacatcattttgttcactggccaatctcaaatacctagaacagtgtctgacacatagtaggagctctactgaataaataaactattactttaccagtatcaaactccccacctgaggtagcactacctaaactacatgttgttccgattctaattgcatgtgatttttctaatcttcgtgtcattatcatagataagtgtccattgctacaactggaagtaatctgtgcacactgcagccttcattgaaacccagataatacttctgttcgtagctgacctcatttttatggcatcccactgtatagcttgcttcttcactcttatttaggcagtgtcttcgcagtttcctgccttgaatacctcttgtatacatttaccaccttaattatttgctgtgtacattttccttgatgccttctccccactatgacagcagattccctcttctgattttccactgatcagcacggcccttcaaaaaccttcacaaaagcccgttagaaacagattgagagacgcatttgtgaagctatttaacaaatttaagtgtcatttttaaagtattcattgtaaattggagcattgtttcatatcggtatcattggagcattgtttgatatcggtaacttgctttaaactgattaagcacatgtaaagatacatgctaccaatagaagaggatgaaaccgagagatcatctttatggttaatagggagtcagtgacaggaaagtaaaaagactgaaggatgattttgggaagtccaggtaattgtctggttatccctcaccaatgtcttgatccaacccaagaatcactctaacacggcaaaactcaatccttcctgttattttatttgtggcaagagaaagatccctaaaataaaatgcatttataaaatgattgccttataataagcactcaataaatatttgctgaataagttaatggatcaatgagtatttccctatggtttgggaagtttagccaaattaaataccagactttcaaatgtaaagggttacgtctcaaaaatatacctcacccagctgatacacataacacttaaataactgtatctgcatgctcagtaagaacttcatgcattcatatatttaatacatcatcaaagcattgtgagacaactttctaacagtgaattgaaaccatataaaaaactttggactttttgagggtttttggtttttgttttttattagagatggggtcttgctttgtcagctaggctggagtgcagtgatgcgatcgcaactaactgaagcctcaacttgaaggtctcaagtaatcctccatctctgcctccagaatagctgggaccacaggtgcaggccaccacacgtggctcatcaagtgacaacttattctcagtcaaaattcatgggtaaaaataaagttaaaattttttattttaattttgaaaaagtatatattttgtgatcatagctttgattctgctctccatcaaatacatttaattttccatttctccatatttaagcgattaaccccattaaaaaatgggaaactattcattctcaactcactaaaggaagtataaaaggaattaaatacaaagacccactcaaatatagctaatttcattaatatttcctgtgtatcatttcaaaaaaaattactaaaaaatattcctaagattcttcttataatttttatagtttcattattaagaattattgagataatttattttaattagatgggcttttataaagtatataatcaataagtgtttgtagatcccttagttttaaagcttttttttaagtttctctttacccaaaaatataatctggattaaattcaatttactgacccaaagatataaatgagaaattcaaaaccattaacactctaacacagctagatggaatgatgaatgattaagggagaaaccataagaaaacatcaggtaatcatctttctagcatggtctgaatgaaatccttcccatgaaattaaaatttgatacaaagtctatcaggaaaacttctaaactttaagatttgtcaggaaaattgtgaaacactgaaatatgcaaaatattagtggatgtcctatctagtatacccttccagattatctgagtcagtcagaatatgagcctcacattgtctttctgctactttacaaccatgcagttgtaagacacagaataatacaaacaattcttttccataaaaatgcaaataaattgtgtccagtgaaatgaaatggataattggcctgtggctattaaccagttttgcgtctgtttcacattcatttcagcatccttgattgcccatatatgtgtgctcttaaaattctcctttgaattatttgtaacatcttactgatcccctcattaattaatgagcttaataaagtctttgatacccattctttttacatttgaataaaagacatgattttaacctttctttaaaagtatcccttgacagaatctatcattaaaagtatgacttttgatccaccttccataaacaggctttcctaaaatttccattaagtcataagtcatcccattcaaattactcaaaataaaatactgcagcatcaatattttgaatccaaatatgaatgaatccaaagcaccatcattatatgatataagtttactatttatatatccctagaagcaaaaaggctgccaattaaactaagacataatgcttttttatcaattagatttcattttttggatatctgtatcatatattccactgttctgccccatgcctctcatgtagatagatgagtatatattacttatccttctaagcctaaatcataggatttgggaatcatcagaatacctgaagtgcatataactcaattaaactttgacattatgaccacattcacacatgcacagataacaactccatcaaaaccaccacctacccaacatggattttgagtccatcaattcaaagaagcatcccagtttcaggtatgttcaaatatgaaaaaatagacatcttagaatgcataaaacaccacaaatataagtgcaaaaacatatagcaggattataaatggcaaatagcttacaatcagaaaacctgtcactagagggtcatcatttccttaaatagtaacactagaataatccacacagactgctagaaatttatgaatcttaaaactgatagtcaaaatctcaatgaagccaaataactctttagggcaagaaaaggtgagatccttgactgaactaaggttattcaatctcttgtttactaaaacagtggtaggggtggtttggtctctagcagaagggcaaacaagatggtatcacataatggagctggcttaaagcaaaataataaaaatgaaaaaacactcattcctctacttctaagaaaattatattcttcctttttgatgtactgctgacattcctttcctctcttcaatcctagattagttaacagcttgtaaaactgctgttattataatgacaatctcaatcaactacatcataaggctttttgcctaaaggatcatctctccaagttgtaatctctttgaagactaaggagacaaaagtctctcttgaacactaaggtcttttccaaattaaaaacaaaatattctaaatatttatgaacgatatcaatcagacttcctgctaaatattacttcttagtttttagccttttgtaatatgttataaaagtttccattgtctttgtattgttgaaggctacaatattgcctagcacatagtaacagcaaataaatgttggtaaactagaaactgactctcacagtggccttgattctcacagttaacctagaagtaagtaccgcaacaatgtttattcccatttcatatataaagaaactgaaggttggagaatttagggttttgctctaaaatcacagttaataagtggcattgtcaaaactgaatcccaggccctttgtctccaagaccagagcaattcttacagtaacagactgaacatcccatgcctagatttccttccctctctcttctcttacctactacatgatacttgactcaggattctggtttgctgaattactgaaaccacatcaacagtgagtcaatggtaattctctacctggttacatttacattttagcacagatattgtaagataaggtgcagcagagattattggaaatacacatattgacagtcagatagctcacttctagtggaactagaatatttaattttcctgtgtctcaagtcctttatctgcaaaagcaggtgaaatgcagatgatcaataaggtcttttcctaactaaaaacctaacattctaaatatttatcaattatacaaaatcagatcacctgctacattttacttaatactggccttgaaaaaaaaaagaaaactataaaaacctgtctgttagattctgcagtgggccaaaaacagaatatataaacaaaaatttaaatatattccaaccatactacttgactaaggacactgtctgtaccaatttaaaactagaaggttttaaggataaatgagatctatacaggcacaattgtcacagcagtccttctaggtatacaagatactgaaacattttactgacctataacttactttttcatacatggcaaaactatatttttctcattacaaatgccctagctctccccacaaagttattgtgaagtctccaaatattgctaatttgtcccttaaagcaaaaatataaaacactttgtgacatatgaaaaatgttcaccatgtcctttagttgcttcaagatatagcatataaatctttgagtttctaaacagaaccatactatctagatatttttgtctaaaagatttaaagcttaaatgtgctacctttttttctctcttgcagctttcaagtcacttagcctgctccagtctccaagatatacattatttttccaataaatcaataaataaaattggtatttttgactacttcttagtataaatcttgtctttgtatcaacaaatgttcgagtgcattttcattgtatgactaaatttctattaaaaatgtaaataatttctgcttactctatcgagtctttaattaaaagtggtttttaaagagtcaaaagactttgatcaatttttatagaatgcaccagggcacggtggttcacgcctgtaatcccagcactctgggaggctgaggcaggtgggtcactggaggtcaggagtttgtgactagcctgggcaacatggtgaaaccccatctccaccaaaaaatacaatttagctgggcgtgatggcgtgcgcctgtactccccagctactcaggaggctgaggcaggagaatcacttgaacttgggaggcagaggttgcagtgagccaagatcatgccactgcactccagcttgggcatcagaacaagacaccatctcaagaaaaaaaaaaacttatggaatgctatcattctgtcaaaaataaacataatatgctttctgttttaacaaatgaataacttaccattgtaccaccctaagttaccaggaaaactaccctaaattaccaataaaattgttcctcctatctttctcctctgcctctgctctacttcccttcaaaaagttctttactccacaatttccccaaacagaaaattttcctgattctcctatccctctgttctttctgtcactctcttcaagatccttttcctcttctatcccaccagcatccccctttgattctctgcctatattctccttcatcttgattcactccttcacagctcatctgcttccacaagatcaactaacatttccatactgatgaatccccaaagaacatttttagcctttatttttaaccagtctctgattctgtatttccagtttccttcaggatatgtctccttgaatgactggatacactattagaattcaaaacttctagtttctctacatcctcctaatctccttgtatataaactcaatacttggggacatataattatcctatgtaatcctaacaatctaaaatcttcaccatttgctagtccttacacccagaatgaactatgttatctgctttatgtcaccacaggatgctaaaatgttattgaaaatagccactaaaaaatgtagcaaatgtttctaatacaaactgatgagttcacaatattctatgagtaaatataatagagttccctctattttcctactagacatctgtttctgatttttcaatattacaaagaaaactgttatcttatcattatacatattttcatatttaataatatctccttagtgtagcagtccagaagtgaaattaatggggaaaaaagataaaagaattgttaaggttcttgataaatactgacaagcttatttccaaaacaatattatcacaacgttagctccatgagtgcaggaatcttgtcccttgtgcatatgataggcactagtaatacaacaatgataaacagtaagcattcaataaattttatttaaataaactaatcaatcaaccaatcagatctatgaaagtacttacaaatgataaacaaacattcctttatatctttattatatcattatactatatttacttactccccctttargagtaaacatgtcactgctttgagcaatgaaatacaagcaaaagtggtatgtgatacttctagtcaaaagtttcaagtgccatttatcatgtcctttccctctgtcacagcaacctaaatgacaggcaaaagtttctgttactattatatatcatcgataatttcttatagtaaaatatagcttttcccttaaaacatatcctttttactgatcagaaattcaccgggaactccctcttcagtgcagggggatcctatggtaggaggattacaagtgtgcactgtcattcctaagaaagaatatggagcaataaaggaaattgctaaagtctggaaagcattcttggctttctgctttgaaatgaagctgacttggaaaatcagagaatttgaataaagttatcttagatttcaatgaaagaaaaatgcttcatggagtagctctttgtattactgcacctctagaggccccagaagacaactaaaaaccaggcaatatgctttattttgaaattcagctgtgtgggctgagatgtcacsttagcatgagggtcaaaggagtacagggagagagggtagccagagcctcagtcacaaattgtaactcacacttaaactcatttgaaatgcaataaacaaactaaacagaataagcacacaactacttgggcactcgaattgagttttttaagaaattttaactgttattatctaaatgctattagataaggaatatttctttcacaaatacagctgaacacattgatgtttaagagttttagtgcaaattccaagaactaaaagaaaatagaggaagacaaattagaaatgagaagctaacttaatgccaacaaattaacctttcagaaagttagaaagaaagaacaaaagagtcaggctattttattattgttttgtttatacttcataagcaaaggtattcgtgggagattttttaataaaygttttccttgtctttttttttaagtggttaaagaagaaaagttaactaggagaagataggaatgacagcagttatttgcaaatttttccacaaggaaaatcctatcaaaatccttctttgatattatttgtccttataatttgttcccacaattgccaaaaaaaaagattacagtcaggttgcatgattatctaaagcccaacatgatgttctatgtttttatcacaattcaagattactgcatttttcctaccataatattaattaatggtcaatataaaaatatggactatattgaaccccaggcaaaaggaaaaaatacacccacaaaactgtaagactatgacactagtaaatcattattcagcattttagtatagttccttctcatatttttccaagccatgtttttgcttgcttatttgattctatatacatgcttaaccatcttattcatttatttatttaacagcataatctttttccatgttaccataaactcttcacaggcttcactttaggtatggtattccatcaagtgtacattccacaatttatattttgacttagtgctggatagttgctttcaatttttgtaccattacaaataattctgttaggaacttattaaacataagcctttccaatatttcaaattcttttcctaaaatacgttcctcacaactgaattactatatatcaaaaacaataatcaaaattaaaagccaatatggtatctgggatttggtacaaaataatacagattggggaagcagatgggagttccaagtgaagcacatttaatttttttcaaaataaaacattcaaacaaaaaattaaaagcaaaaaaaatcatcctgaaatacacacacacatacacgcacacgcacaggaacacacattctagcaaagatgaaagtatttttatggctcttgctacacattgccaagttgcttccctaaagagttgtaatcatttttattcccaatatatagcttaaggtttatagtgaaggcttttttaactcctcttttctttgaagtctttgtttgtacattgactttggcatgtctctgcaacctactgcaaatttttcctattgagatatgttcctgagttttcactttattctggagactggaaatcgctcttatgatgctctttgctcatcatgcaaacttgattccatgtagaataatagttggataacagtacaatgatttacctacaggaatgtttttcatattgtttacaaggcaaaaatacatttaacataatgtttagtaaaaactggaaacaactgtttctgtatcacttgcaacgtcacagcattccttcaaaatgtatttactgtcatggaaaaaaataatttgccactataatgttgagtttttaaaagtaggctataagattgtttgtatgaacaattccattttatatagatcatacacacacacgtgcacaaacacagagataaaaaaaacctggatgtgtatgtactatagtatcttcttggggagttgataagtgatttttacaaacatctttatacttatttatatatttttattttaataataaatattctaaatgtataatttttaaatcatcaaccaaagtaagactcaaagtataaccagtaattgtttgagcaacttattatgtacacatgtcaatttccagcttgcttacataaatagtctcccaattggatacatcttagtgaatttataatcattaaacaaagtaatgaataacatgatcatcacctgaataagattatttttcttctaaattttcaaaacacagctttgtgcccaatggttttccaaaactgcctcatattaacaagaaaattttggttcaaagtagagattaggaaattaatgaaccaatgaaacacagttaattacatccagaaattaatgatcaggatattaaaacttggaaaatatagaaataatggttttcctttattaaaaattttttttgaattattgtgaatacataatagttgtatttatgaggtacgggtgacaatacaagcatacaatgtgcaatcatcaaatcagggtaactgggatatccatcatctcaaacatttatcatttctttgtgtgatagagcttttcttaactagaagttcaacgataaaatgtgcttacagacctaactaaaaccctatcatgtccacctctaagaattctaatacagttcgtctatagggccctagctctgcccctgccattaagtttgtgtgaccgatggcaaggtctgcatctccaaaatcagtattttacatcagttgatttctaaggtcttcgtggctctgtggctatatatacacttaaaaagaaactgaaaacaaatctgatcaataaagaactttttcatgacatatggtatgttattctgcagggttgccataacataataccaaacacgaggtggcttacaacaacataaaggtattctcacagttccggaggccagaaatctgaaattgaggtgccaggaaggctatgtccctctgaaggcagtaaggaaggatctgttccatgcctttctcctagtttctggcagcctcaggtgttccttgacttgcacatggccatcttctgcctatatctcttcacatcatcttccgtgtgtgtgtgtgtgtgtgtgtcccaatttcccctgtttataaagataccattcatattggattaggacccatacaaatgacacctcattttaacttgattacttctgtaaagacccagatcttcaacttttctgggggggatccaactcaacccataacatgtgacatgctggttaatctctgttgccctctaaatccattccctgctcctttctgctccacatcccagaggctaacctctgtgaactgcatcatccatgcttctttaatttctagcttcaagttggcaaatgggaggcacctgttcaagatcacaagacaacagaagagagaagggagggtatttgttgccactccatacccccaccaggccacttttttggtagcaactacattcagctatccacagtcctatttccctgtccactagccccgctcccataattctagctctcaccagaatgggtaattccattcccacctctttttccttctgccatcaggctatgatgacatcccactgttgctagtcyctgggcacttcactattgttcaatggttgcattctgcactaccacccatccctctataatgaagtccattcattaaactctcttcattgtccccattgaatgtaccgtctgtttctcaccaaggccctatctggtacacagggataagtcaattctttagagtatttacataatttgtttatcaaaattctaaaaagtagtttagcctcagcatggctgccacaaattgagatttgaaataattggtagtaaagacatcactttctgtcatatatacatttgctactgttttgctcctttcctccttcacacttatatcttaatctagaaggatatggcagaggtcaggagcatggattgtgaaggcagactgcttcactttgaatctagcctctaccacgtactagattacataagtccagttaatttacctctctgtacactaataaaatgggcataaaggtaataatatacaaggccaggattacaggtatagcttacacctgtaatcccaatactttgggaagccgaggtgggagaatcgtttgaagtcaggaattcaagaccagcctgagaaaaatagcaattaccttgcctctgcaaaatatttaaaaatgaaaacattagccatgcatggtagtgttgacctgcagtcacagctacttgggaagctaaggcaggaggattacttgagcccaggagctgaatattacagtgagctatgaccatgccactgcactctgcctgggcaacacggcaaaaccatgcctcataagtaaataaataagtaaagtttacaagtcacaggacagctatgtgaaatatatgccaaattacttacattaattttttaactattaaatcaattaatctatataaagtgcttagaacaatacctggcttgtagtaagtgttctatgagcattagctgctattattatgattaatttttcctctgatgtttttcccttgacctacacattaagtcactctagcctcaatcatttttacacggaccctacccaaccaatcaaatgtatgctgggaatatacaaaaaacacagccaactcttttttattttattttattttttcccgaaacggagcctagcttgtcacccaggctggagtgcagtggtgcgacctcgcctcactgcaagctccgcctcccgggttcacgccattctctcgcctcagcctcccaagtagctgggactacaggcgcccgccaccaggcccggctaattttgttcttgtatttttagtagagacaaggtttcaccgtgttagccaggatggtctcaatcatcttctgaccttgtgatccacccgccttggcctcccaaagtgctgggattacaggtgtgagccaccgcgtccggccaacacagccaactctttaaattttcctatgtaaactacccattgtccaaaagatcagtaacacctgtcactcctgccataatgggctctctgacccctatatggtgtacatcctaagtcctcaagtgttttatttgcttacgacgtatttttgataattctgctctcagtcaagattctgataaatcatcaatcccctacctgggctatttcagctatatgtcaaacactacactcccactcacttcctggggtctattccggcttttaaaagacagttttcaaacccctacttcagccaaagtaaatggtccttaatagtgattttcctcccaaaatatgtgtacttagttttgtttaattgtttggggatggggaggggtagtagtgtttgagaccaggtgtcactaaaaaaaaaaaaaaaaaaaaaaaattaaaaattaaaagaagacatttatgcagccaaaagacacatgaaaaaatgctcatcatcactggccatcagagaaatgcaaatcaaaaccacaatgagataccatctcacaccagttaaaatggcaatcattaaaaagtcaggaaacaacaggtgctggagaggatgtggagaaataggaacacttttacactgttggtgggactgtaaactagttcaaccattgtggaagtcagtgtggtgatttctcagggatctagaactagaaataccatttgacccagcaatcccattactgggtatatacccaaaggattataaatcatgctgctataaagacacatgcacacgtatgtttattgcggcactattcacaatagcaaagacttggaaccaggccaaatgtccaagaatgatagactggattaagaaaatgtggcacatatacaccatggaatactatgcagccataaaaatgatgaggtcatgtcctttgtagggacatggatgaagctggaaaccatcattctcagcaaactatcgcaaggacaaaaaaaccaaacaccacttgttctcactcacagatgggaattgaacaatgagaacacatggacacaggaaggggaacatcacacactgtggcctgttgtggggtggagggagcggggagggatagcattaggagatacacctaatgttaaatgacaagttaacgttaaatgacaagttaatgggtgcagcacaccaacatggcacatgtatacatatgtaactaacctgcacattgtgcacatgtaccctaaaacttaaagtataataaaaaaaattatcaaatttagtcgctttttaggaaagggtaaggagttggggagagaacatgggaaaagaaatcctcattgatctttgcaaattataaaccatctttttaaagtaaaaataaacacacacaaaacttatttaaaaaattcccttacttggcttagcagaaatatacctcagttacgataactataatgaacaaaaagtgattactgttactgtataaaatggccctgagatgtagttatgtactatatctgtgtatttatataagtacatttatcaatacatcagaaataactagatctcaagaaaggttcaacttagaaataagagtacagtaggccatccatatctgtgggttccacatccatggattcagccaaaagcagatcaaacatatttgggaaaaaactgtctgtactaaacatgtacagacattttttccctcttattattccctaaaaaatacagtgtaacaactatttacatagcatttacattgtattaggtgtcctaagtaatctggagataatttaaagtatacaaaatgatgtccataggttatatgcaaatactacaccattcacatcagggacttgagcatctttggattttggtacaattgagaggtcctggaaccaattccccatggatatgaagggacaactgtactaagtatgagctaagagtagtagcaggaaagttcataagtaaaaaaccagattgaccaaatagcagattaaatcactgatcagcagaagacccaagtggtcaaaagcacagcccctgaggcgagaaggccctggtgtaaatcctcaccccagcacctactgggtgaccttgggcaagtcacccaatctctatgtgcctcagtttcctcactgtaaaattacagttcttacctcacagtgctattggaaagattaaatgaggtaatatatgtaaagtatttagaacaattcctgacacatagtaagctcttaaaaactttyagttctaaaatttccaattctatatacagtccagaaatatattcagttctgtaaagatggtattcattttaaagggaatattttgttgcagtttttggcttcttttctcctacttatgtgagtcacactgctcatactcacttaagcataatacaagtcattttacagaataaatgttcaaagatggctggtatgtatattgaaaacaatatgccaactcctgagttcatgtctagacttcctcgggattacagagacggtaaggttaattacccttttaactatgatcattgtttattaccttgctttagttttgagaaaaggacaaaacattctgagtatatgcaaaaatattctagttgacaatatattcattactgtttatgacctctagtattctttcaaattaagtaattaagtatttaaacaaacactcccgaagtagaagcaaaaatcactttctcagactatttagcacttcttaaaggtctccaagaagtagtacactccaattaatatttatcctcttcctcagagcatcgatgcttacactgcytaagggaaacctgttgtcagctaaggcaaatgaggttaataacaggatttggctaagaagaaaaatatgttgcactttagagaactaacatctcatctcatctcaaatacgctaggagaataaagaggccaggaaacaaccaattgtaaaaatattagtaaataggtaacaattaaagtcattctttctcatcccaactagatatactaatggccataattactttttacttacattagtattacctcaggggatctattgttttcttataaaagtcagctgagctgtacagcttaaccaagataatctgctatattagtttccaagtatagaaagcatatgtgtaaataaaacatacatccctcattgttacctggatgttattaacccttgcttcccaacaactaaaatatccacacagggatttacttacaaaaaaaaagaaatatgcttattaacctaattatgggtatcacataaatacattgtatttgcccatttattattattatagcaaggctgtaggggccatactatccatattggatggctagtttctcccagtagccatcaagaagcctaaaatttcatcatttgaaatatttttaagtcttgacttttagaggagagagaactataaaagagaatgtctagagttaaagatagaacagcagtctaggactcatatgcaatataagaagaaaatggaatcagcagaagttctaagcaggaaagtgatattatccaaatcatgttggaaataaatctgctagcaatgtggaaaatgtactagagaaaacatatcatagtcaaagaaggagagatctatgtggcacctggacttagtaaatggagaaaagaaaaatattcaatagatatttttcaggtagacccaaaaagactctgtgtctaactggatacagatgataagaaaaacctagaagttaaagatggaagtgactctaactttgacttgtgactaaatatgatggcaataatcaaaatagtaaccagaagaagaaaaaaagtttggtatgggctaggttgggtttgagaagtctgaggaatatcatcatacacatatatccaatggagagctaaaattacaggtatgatgcttcaaaaagaaatcaggtaggcaagaagttaagagcagtggacaaagggaaaagagaagagggccatttctgagggctctgttctgttccactgatctatatctctgttttggtaccagtaccatgctgttttggttactgtagccttgtagtatagtttgaagtcaggtagcgtgatgcctccagctttgttcttttgatttaggattgacttggcgatgcgggctcttttttggttccatatgaactttaaagtagttttttccaattctgtgaagaaagtcattggtagcttgatggggatggcactgaatctataaattaccttgggcagtatggccattttcatgatattgattcttcctacccatgagcatggaatgttcttccattygtttgtatcctcttttatttcattgagcagtggtttgtagttctccttgaacaggtccttcatgtcccttgtaagttggattcctaggtattttattctctttgaagcaattgtgaatgggagttcactcatgatttggctctctgtttgtctgttattgtgtatatctacaactatctgatctttgacaaacctgacaaaaacaagcaacggggaaaggattccttayttaataaatggtgctgggaaaactggctagccatatgtacaaagctgaaactggatccctgccttacaycttatacaaaaattaattcaacatggattaaagacttaaacgtcagacctaaaaccataaaaaccctagaagaaaacctaggcaataccattcaggacataggcatgggcaaggacttcatgtctaaaacaccaaaagcaatggcaacaaaagccaaaattgacaaatgggatctaattaaactaaagagcttctgcacagcaaaagaaactaccatcagagtcaacaggcaacctacaaaatgggagaaaattttcgcaagctactcatctgacaaagggctaatatccagaatctacaatgaactcaaacaaatttacaagaaaaaaayaaacaaccccatcaaaaagtgggtgaaggacatgaacagacacttctcaaaagaagacattaatgcagtcaaaagacacatgaaaaaatgctcatcatcactggccatcagagaaatgcaaatcaaaaccacaatgagataccatctcacaccagttaaaatggcaatcattaaaaagtcagggaacaacaggtgctggagaggatgtggagaaataggaacacttttacactgttggtgggactgtaaactagttcaacccttgtggaagtcactgtggtgattcctcagggatctagaactagaaataccatttgacccagcaatcccattactgggtatatacccaaaggactataaatcatgctgctatagacacatgcacacgtatgtttattgtggcactattcacaatagcaaagacttggaaccaacccaaatgtccaacagtgatagactagattaagaaaatgtggcacatatacaccatggaatactatgcagccataaaaaatgatgagttcatgtcctttgtagggacatggatgaaattggaaatcatcattctcagtaaactatcccaaggacaaaaaaaccaaacaccgcatgttctcactcataggtgggaattgaacaatgagaacacatggacacaggaaggggaacatcacactctggggactgttgtggggtgggggggaggggggagggatagcattaggagatatacctaatgctaaatgacgagttaatgggtgcagcacaccagcatggcacatgtatacatatgtaactaacctgcacattgtgctcatgtaccctaaaacttaaagtataataataataaaataaataaataaataaataaagagaagagggccaaaaaaggaaccagcaaagcatacaaagctaaaacagaaccaagaaaaaaggatgtaatatacaacaaagggccagaaaacttcaaggaggaagaattcatactgtccatttctgctaagagatgaagaaacatttgtatcgtggccattggatttagcaatgagaagatttgagaatttttccaaagagtttttgtagaatattagagatagaagtctgattttactaaactaaggcagtaagtgacttaaggaattgaagaggactcacagatatttcttcccagaaatatctctttccagatgtttggaaataaacatcagtactctttccagatgcttggaaataagagcaaaatgtactgatttacccgcaaatcttgacagattctagggaatgcaagtctctgtcattattgtatagaagagaggagaaaacaaaaggtaattaaagctgactctaaagtctctaaatttgattcatgggtatagatataaagattccataactttagcagcaaggtccaatacagtagccaaaagccacatgtggttactgaacacttgaaatgcaactagtccaaactgagatgtgccaaatgaaaccaacaccagatttttaagaccttatttcgaaaaatgtaaaatatctcattaatattttaatattaattacatgtggaaatattttagatctattgggttagaaaatattaaaattaaaattacacttgtttcttttctcacttgtttcaaagtgttagtagacaatttaaaatcacatatatggctcacgttatatttcttttgaacgtccctgaacattcaaaatgttatcctctagaataaatactaaactggaagaacaggattcagaaaggttccatcacagccagcctatatatatatcatattagtgtgaaagttaatgaaggggacacccaggacaacatcatgactttaagaaaataaagtcctaactaattaagtggcttactcaggtcacctagctactggaaacaaaacccagactagaacctagtccgtgggtatttcctctattattccacctcttgaaatgtcagtgaaaatttaactgttatatacgatcttattctgtaccacattcaataaaatgacttgtaaaaaaatcttaaaatcataatctccataagagtatcctttgttcaccagtcaacttgtaatttaactaatattgttaacgtatgtcaactcacgattcagttttgttgtgttttactttgggcatgtatatatatactctgaatttatttcaaccaattccacatgaattttaaagagaatatcctcctttcaagtacacatctctttaaaaaaaagttctaagaaaacatatctggaaaagttcagagaaactactctcaaccattattatctgccatttgatagtggtaacttactaaggcatcatgttgctcattaatgtaatattcatacaaaattaaaagttatattcaaaatatagctatagtatatgatgatatactgtatttcaaattctggcaagatttaaaatcctgctttgcccaataaaatcttcaaagacactcaaccattatgttgtaggtaaaccacagttccagaatcaccaataattgtaaccaaccaaaatatttagctgtaatttcttcaatatactccaacaactataaatgtatttatgcttttcattaagaaaagacacaattatttaaaaaattagtcttttcatgctaactttccatgtgaaattgaaaagtaaacatcacttgaaactttaaaacttaattttatgagacatcttaataagctaataactgttgtagtcatggtagttatttcctttgtagaaatactgytccaaaaatagtgctatgctgagtgcagtggctcatgcctgtaatcccagcactttgggaggctgaggtgggtggatcacttgaggccaggatttcaagaccagcctggccaacatggcgaaaccaagtctctactaaaagaaaaaaaagaaagaaaaaagaaaaaaaatgcaaaatagtgctgataaaaatgaatgaagattatttgattaagcaacatgcttaattttgtacgtataccctatatttattttaacaaataaaactattattgtcattccaaaatgacattattaaaaataataaaaataaagaatatcagctccacttcttgaatatttgctgttatttcaatgttatcacatagataaaaggatggtgaaaatctagctaatagagttagctatgcacagggtgactatgcttccaaagaggagctttccatggcgatctgcatgtcttcttttctttgcctggctgtttgtggcccctcttcacataactggagttagtgtattcatctattccaaagttattccatctggactcctatgtggcagcctcccccaaaatacaaaatacaaaaaaatacaaaagtacagagccagatgtcactaagacctgagctttaccacatccttaaaagttttcaagttttccttggttgtatatgtccctttttggcttactatatagcagatgctaagtgtcccactgttgactgttcttagcaaggcgtaatccagcatggagctacagagaatcactgctccttcaatactggcagactgaatgacattgttggtgtttatgtcaacctacttcatgttaagaataactgacagttgatagtcatgacattgcataaacatctgtggtagattcaatatcaatattctagagaatatttgcaataagcagcatttaacagcatttgttcagccactrtggaaagaagtttggagatttcttaaagaacttaaaacagaactatcatttgacccaccaaacccattactgggcatatatcaaaaggaaaataaatcattctaccaaaaagatgcacacactcatatgttcatcacagcactatgcacaatggctaagacatggaatcaacctaggtgcccatcaacagtggactgaataaagaaagtgtggtacaaatacaccatggagtactacacagccataagaaaggatgaaaccatgtcctttgcaacaacatgaacgcagatggaggccattatcctaagaataaattaatgcaggaacagagaaccaaatattgcaagtactcacttaaaagtgggagctaaacattggtcactcatgaacataaagatggcaataatagacactggggactacttgagtggggagggaaaaagggggaaaaaggttgataaactaactattggctattatactcactacctggatgacgggatcaatcataccctaaacctcagcatcacacaatatacccaagtaacaaagtgcacatgtgccccagaatctaaaataaaagttgaaattactttttttaaagtccacaatatgataaagtgtgctaaggaatcatacctccttgaaaataactaaaaacatcacttctcccatttataaagcaaaagtgaatattcaaagataactgcaggaggttaagttcattagccaatattcccctagcacctaaggcagttttccgcttttttttttcagtatgctcttattactgcctaattatccatattgcttttcttcctttttgttaaactgaaattcacccaagcagtttaacctttcatttagaatcattaaatacactcccctcccctcactgataattggcctctttctttattaactgatttccccccttgatttattacaaaccttttttgccaaatttggatccattctgttaatacattctttaccttcttgcaactcaattaacacagtgtcattgttaccaaagctttcctattatttcttcaagttcttattgctctttaaagatcatctagtagaataatgaatttttaataaacccggaatattttaatgattcttacttaattctatggtaaaatttatgtgagacatactattcttcacactgaaatgtttcctactgtactgtcataatactatacggtaactttctagcaatccaaatacacaaatccttgcaatataacttatgacttctaaaagtacagaaagccatattataattatcatatccatagctaaatcaaaccaagccagcttcttcaacagcagttccaacatccatacaatttttaataaagtgaaacttatacttgtgccatcagtaagtattaatgtaacctctgagtatgagtaaacctgtcactagattatgcaaaggaataacctttcatgggcccttgaggtttctccttaatggaaataaacaatttttttaaaaggcattcctgttctcttcttggaaagaaatactttcctgagctccaaggcactgataaaatttggtgggtgtcgttttaaggcctttccctttcttatcagctaccgacacatttcccagccttgccacctctactcaccaaaacagtgccttttttttttctaaaaggaaaagaaaaatgaaaggtatctactgaccttggatcaaataaggttatgtttaagtttagtttagagatttcttccacttttccaagacctaaaatatgaagcagaatatagactatggtatctttatttagcaagaaccagcggacactgtgtttaccagtgggaaacacatcttaagttgacaagagatatggagataaccagaacaaaattaaccattagaatattaaaaactctactcccagaataaattacaaggaacaaagaaacaaagatttctaccactatcttattttgagtaattttaaataaataggaaaggattttgatctcatccttctgtaaaacgtctacctgccaacatttatgtttgcaattttcaataattgcaactacagacataatctttataagtatatattcatttgatgtctttcaccaataaagacctggtgttccaagtctcctatctgttccagaatttctatttcatgtgccaatatagctcttctttaaaaaatttcaagtcagttttgactccaactttaaaactatgcaacatagttttctgatatcctgagggattaattcttatgttgaacttcctaacaattccattttgatccctaaagctattttcatgcattttttaaatgaaagagaccttaaagatcaactagtctgtacctcttattctgcagatgatgcaattgatccaaggaacagttaaagtaacctgtgcagggtcactcagccaattaaaaatgatgcaactcaaagtagaaacaagatgtcccaaagcctagacccatagtcttgcactgaagaactggcaaatagaggctttcagatttgtttcacagaaaagaaaataatactttttaaattagtcaattatgtaaataaaatcggtgttttcaaacacttaataatcttttgtaaaagtacatttccttgtacatagtaaacgtggttttagaactgtttgtattttttattgcttaagatgattttctattggcactgtaacaaattacagcaaatttggcggtttaaaataacatttgtttattatctaacagctctcaaagacagaagcctagtaggtttggctagatcctcttcttaagatctttcaaggccaaaatcaaggtgtcagtgggactaggtccttctatagaaatcccaggataatctatttccaggctcattaagttgttggcaaaattctgtgtagttgtaagaccgaggtacttgtttccttgctgatctttgattgaaggttattcttaccttctagaggcagcctgctttcctctgcccatggcccctgaatcttcaaaggctgtaacaatgtgttgcatccttcttgtcctttggatctctcacttcatatgctgcacttccctaactactacttctgcctctgtttctaagggctcatgtgattgcactggacctacatggataatccaggataacctttattttaaggtcaactgattagtagccttatttacatctgtccctttggcaatgtaaagtaacttattcatggatatatcatcttattatattcactatccagggaattagagcatggaatctgcttggaaaccaaagttctaattattacatttagctcatatttattgatgcatccttaaggaaatgtgactggttttctacagatcacgttgttcaaactctaacaaaataaataactttgcattcctaatatttatatatccatttccaggaatggctctgattggccctgcttaggtccagtgcccacccctctaccaaccaccagggctggcttcatggcaatgtgaccagtgcagtcacacataatcctgggctcagaagggaccccacatttggggcttaatgctctgaagctaccaacttgaaattcttaaccctttgaatttgttttgtacatgaagtccaatagaacaattgagcatgtgccaggggcttgtttgtctgaaaaagaatgcatttctctttcattttttaagaatatttccaacaggtacaacattctagattgacattttttttccttttaccactttatagagatgtcattcagttatctcctgtcttctatcagttgaaaagtaggctatatttttgcttctttgaaggaaatgtcttttttcctttgaagacttttatcggccggacacagtggctcatgcctgtaatctcagcactatgggaggccgaggcaggcagatcacctgaggtcaggagttcaagaccagcctgaccaacacagagaaaccccatctctactaaaaataaaaaattaaccaagtgtggtggtgcatgcctataatcccagctactcaggaggctgaggcaggagaatcgcttgaacactggaggtggaggttgtggtgagccaagatcatgctattgcactccagcctgggcaacaagagtgaatttctgcctcaaaaaaaaaaatagacttttatcttctttggttttcagtggtttgactgccatgtgccctaaatgtgctttcattgtatttattccaatagtgctttttcattctgtggattgatgtctttcattgattttagaaaactcttggcctgaatctattaagataatgcttcttcctcaattcctactctcctattctcctgggactccaattagatggtagtcagccttttccactattatattatttacactattgattgtgtgttccattcttttattcctcccatgcactattctatatattttctaattgacccatcatccagttcactaattctttcctcagctgtctaattttctaataaactaatctattgagttcttcatttcagtcacagtttttatttctagaatttctttaaattatttttatggattcttattctgtgctgaaattatccaccttttcatcactttaaaaaaatattgatcataatttttttctgtttttggagagagggtcttactctgtcacccaggctggaatgcagtggttagacmatagctcactgcagccatgatctcccaggctcacattatccttcctcccatctcagcctctgtagtagctagactacaggcatgcaacaccatgcccagcttttgtttgtttgtttgtttgtttgtttgtttgtttttggttaagtagagaccagggaagtcttgctatgtcacccaggctggtctcaaactcctgagctcaagtgatcctcccacctcggcctcccaaagtgctaggattacagacatgactcaccacacctggccaattacagttatttaatagtccatgtctaatcattccaatatctagattactgtgagactgtttctatcctttcttgttttatattgtttttcttggtcctggcttctaatatgcatggtataattttttattaaatgccaagtgttgcgtataaaaaaattatagaaactctgcatgatgtctcttgcttccagcaatgacagacagttgaagtaaaggcagaccaccttaaaatcaagattgggtttatcaaagaatacattttgatttttgtaagtagtggcctatttatagttcttcctaactcctaggatatagccccacaagaattccaatgaaaagcttagagtgttttaccagggtccttcttcctccttcctgaattttagcttgcaggcactgtgaaactgccaaaagttctgctcatcctgtcaccatcttagctattgctgcttggtttctcagcttggcctgtgttgcttgcaaattgacagaacccaaggtgaaaaatgacaccaaatacagggctcacttcagtgtgtttcctttcattcttagatctttagctcttggtagtgctccaatgcctttagatatatatatttttctaatccagtttttttcattattcacagtgtaggccttagtttgaaataaactagtccatttacagccagaaatagaaatcagccactgactgatctgtggcctatctttatgtatgcctctatatcttattaattccaaaagtatttaagataagttgacacccttatatgacggttgatttgccttgtgttctatttcctgcttgaaacctaaactgttcactactctaatatcctaattaattttgttgtaattattatgtaaacttacattcaaaatgcttctcctcgatagctaaatctgactccttacatataatatttaacgtgtatttgggaggtcctttgcaaatgccgtcttgtacttactcatttttttaaatataagaaacagcattctcagagactagattatttcagagtaaaaatgaaaacatttataaacataagcactagtatttaatagaatgttgcctgtataattttgttctttgaaaacttatagttacctctcaaaggatataaaatttataaaacaggatgagcagaagctatgtataactcctatggttacattaacacaaaatctcggtaattcaaaattgaaatttattaaacatttctaagatgtaatttgtctctgaactaagaaaatgtcttattacataattaagtgtataagcattgtgaaggcagtttatcctactttaaaaaataaattgctgttaaggactgtcttaaggataccaacttttttttttttttttgagatggagtctcactttgttgcccaggctggagtgcagtggcgcaatctcggctcactgcaagctccgcctcccaggttcacgccattctcctgcctcagcctcccgagtagctgggactacaggcgcccaccaccacgcccagctaattttttgtatttttagtagagatggggtttcaccgtagccaggatggtctccatctcctgacctcgtgatccacctgcctcagcctcccaaagtgctgagattacaggcgtgagccactgttcccggccaaggatatcaactttttgtatggctatgaacagcatttaaaaatcagtttaatctatatcaaataataagaataataatacctatactatctcattttatttattttaaaaatgtcacttgtacatatacttagtaatgactgcaaattactatggataattgaaagtaccaaaaataaactgcaacacaggatttccctccccagcattttactgtcaaaaaaaaaaaaaaaaaaaaaaaaactggaaacctaggtacttcatcctccctaaagaatctttcataaaagtcatggtctttctacatttggttcctaaatgtactacattaactacaaactcagaaaaatgtttggccatagattttaaaaattgggaatgagtacagatagaacagataagtatacacaattatattttcccagctcaattgataactggcttttaatacaattatgggtcattattcagtattattattactgtggccaaaacatgaaattccatttttagcaggttccaattaatttccttggttggtcaaggaacctttcaagatttacaagcactcaagacacaaagcatctttcgtttttcttttttcaaatgctctattctatttcatctatttcccttgctcaaatctttatgactctttgttcatacttatcgatagagaagcagccaccacactggccatctatcagaaagtggtaatgagtttagcatgacaaaaaccagctgttgaaactgctgtattatgcacactgtatgttcataatacagtaatattgctattaatgaagagactgctatgtatttcaggaaccactgtatcagaaattcaactacagaaatgggagtaaaataagagatgtagacataccagggccagaatgacttctttggtgagaatcaatgttattcaaccatagcatcgtaccacattatatggagacattataggatgatggttaagacacagctttgatgtgaggcacttcaagcctttgctctgccacttattaatatttactatgtccttaagcaggttatttagcctctctatgctttagtgttctcatctataaaaccggggataacaatacctactttactggtttttcttaataagaatcaaataaaagtgaagttagaactcctaacccagtggctaacaaaaaaataagcagtcaataaacactttaaaaatattatgttttttttttttctctccatagattatgtgtctttttctctctgcctttggacctgatcactccgacactcttaccaacaccaggtgtttattacctatctttagaagtctacctttgcttcataggaactaccttagtgttttccatctcagactttgggattttatcttagttcacttcagacatactccagggatacagcagtgtacaatgggaaaagatttagacgtagtgttatcaaatagaaataaaatgtatgtcacatgtgtaattttacattttctactaggcatatttaaaaaggaagaatcagccagatgcactgcttatgcctgtagtcccagccactcaggaggctgaggcaggaggatcacttaggcccaggagttcatgcccagcatgggcagcatagcaagacccaatctcataaactaaaactggaagaaaaagaggaaaaagaaacaggtagcattttagtaatatatttatttgcatgaatatatccaaattattatgattttaacaagcagcaatcaccacatttcaagtgttcagtaactataggtgcttgctatattagacagtacaggcttagagtcaaatgaatgtggattcaaattctggccttgctttttacttgccatgcacttgctgtaaatctgtttcattatgttaaaaattactatctccagatattgtgagaattaaataaaaacagcatactcaaagcacttagcacaatgcttacttacaggcatgctcattcaatgagaattccctcacaccaaccttctactatagaactgaacactggctcartacagtgaaatctgtgatccagattaagaggaaaggaagagaaaggaagccccccatcgtccttcctttctagctctctataaactgtggccatttctcccactcacacagctctccttctttgcttcctagcagctataaatttgactcggtagacttatttctagaatccctgaacccttgtagtcatgacccaagtatgtggttccaagaaactaaaaaaaaacccatgcctgaaagagaaatcctaccatctctttcttctctgcccctgtggtatccacctccccagctggccctactgcctagtcagacagagtttctcctttattcaggggttctcactgctgcagcttcctcagcctcagcaactgccattaacgttagtgcttctctattgaaagagagtctggcatcaaacattaaagaggctgagcagcaytctgcaaaataactggacagtacccttcaaaagtgtcaatggcataaaagacaaagatcaaggaactggcatatactgaaggtgactaaagagacataaaaaataaaaaatgaaaatatgggatcttgagtaggatcttggcccaaaaaaaggacattagtgggaaaacaggtgaaatctgaataaggtctagacctattcgtctaataagattagatctaataatattctactgatgtcaatttcctggtttcaatacttgaactatggttctatataatgttaatattaggggatttgtgggaactctctacactatttttgcaacttttcttcaaaacaaataaaagtaaaattaagttaaaacacttttaaatgtgattatttaggactttattatgaaagaacctctgtcccratggacttgttaagtgatatattattgtgaaatagtgcaacttatgttaagccaggaaggccatcacacaggttaacgaaaagtcaattccaaggtatagaaaattcaccttactcaccactatgagtttgtaaatcactaagagagtatgatgccacctacatatactatagtgaggacttgatgacagcaaatcatattttgtgcaaccaataatgttattaaataaatgtagctactgaataacatacttaaacaataactccactgtgaccaactttttacagaaagaaagagacagtgaaaaataagaaagatatgcaaaaaaataatatgcacccacctccctctgccagatctcccatgctttaggaaacaacactggtcaaccaactctgaacaaaaccccttgcaatagaaaggacagtctgctttgctatatatgtgtttctgtaacatgaattaacatagacaattggtaagtggagaaaagatttcagtgtaatgcagaagttacattggttcctatgtaatttttttcccagatgattaatgttttgccttattagtacaggcaactgaaggctacgtatactaatggcagcaaaccaggaaggaatcagtattatacattcagcctttctctgagaagtgctactgcaaagttaaccctgatctttgtttataaataactaaataaataaaacaaagtaacayaaaacaatgaggagagcatacaactctggtatcagtacattttgtacaaagcttacaagcttttctctatttatgacttgtaatgataatgtctttctgcccttgcatccacagacagcctcaacccttccttataccacctaccaccaagctatcttcaccttttatgttttaagtaaaacactacttttactgcagtttaattattagaaacttcatgtcttttaaactgtgttagtatttttattgacattgttattgttttcatcagtgctctggttataaagttgaataagccctactgatttaagtaagaatttggaaactgcaaattttccagaaaagcacacataatattatagtagaaatggtgtattaccacacattctgaatacattgtctcaagatttttttaatataaaaaggttatactggtttgttttcaaagattacttatttatcaatgaagtatactgttaatatcaatttctaaacaaaattacgaagtgtattttatcatcagctttaaatcgaacattttaatatacacttctgtatgtgtcacacatttcttaaataaataggatgttccaatgtagtaacaaaaattatcatctatgttaaaaacaaactgatgcattgtataagaaaagcaaatattcaatatttgatataaattaaatgtatattatgaactgcaatcaaaccaacatcaatcttctaaaatgaagcagtttctaaattgtatgaaaatacatggatatggtctagaaagcatgtttcatcataagactaaaaagatactttttattaggcagggtctcactgtcacccaggctggagtgcagtggcacaatcacagattactgcagtctcgacctcccaggctcaatcgatcttcctacctcagcctcccaggtagctaagaactacaggcacgcatcaccaaacccggctaatttttgtattttttgtagagacagggtttcaccgtgttgcccaggctggtctcaaactcctgggcttaagggatccacacaccttgccctcccaaagtgccaggattacaggcctgagccacctggccctgacctaaaaaaatactttaaataatgctaaagaagaatttagcatcagattttttgtttctttctcaaagcaacaatattgcttcacgatcatctgttgttaaatatataatactagtaactaagcactcttttatgtaaatggctcctcctaagaacaagcacatgaaagtttgtgttatttgtacatgacaaagatatagcacataactgagtcattaaaaacacagttcaggccgggcgcagtggctcacgcctgtaatcccagcactttgggaggccgaggtggatagattatgaggtcaggagatcaagaccatcgtggctaacacggtgaaacccgtctctactaaaaatacaaaaaattagctgggcgtggtggtgggcccctgtagtcccaactactcaggaggctgaagcaggagaatggcctgaacccaggaggcggggcttgcagtgagccgagatcccgccactgcactccagcctgcgcaacagagcgagactctgtttcaaaaaaaaaaaaaaaaaaaaaaaaaaaaaacacagttcaactggaatagctataatttatatatcaatcccaatttgaatagaatatttttgaagttaatgtatataataaatatcaatcactatgaatatttatataaaatagtagtgtgctctttttaatatactccatgatatggtaggatacttttatggacccatgcaaccctgaatatcaagcagccctgttttatttttcaattatctatttaagtccacttggttagagatagtcagcatgtttctcacgggaaaaaaaaaatactgcacaattgtctgcgtatagtgtgacctctttcacttgggtgggtatcctttccatcaccaactaagtgaggatataaccttgtcaaaccaaaggcaaaagaataataagcatatgacaggctaacccagcatggaaaaggttgtttaggaggttgcaaaaatagtactcggaatgacaaaataaaagtacacttcaaagagcaggttaatatttttaaaagcactcaaaacctgagaagcatttaatccccctccttggatgtctgccatacaaaactccacttgaatttatttcattagtcactaacgagatttggttaatatgttttcaaatgaatactggtagaatagtctgaaagaaacacatttatagaatatctatttccacaaagcactagccaaaggtaagtacaaataagcagatgatgtcttgcttttaccaattataaattaccatccaacaagaaaaaaatccttccaattcaagaatcagaaatacaaatgggaaaagtatttacccagtagcaggtttttactgtctccaaatcaaatggcagtaacactgctaccttaattgctacccctaactggcataacagggaatcatactacaacatttttataagtatttgaaaccagaagaaattagacaagtttggctacagtcttcctagtgtaaatttacttttaaagcaaacaaacaaaaatctccaaaccatttaggcctgtcctaggactatgtattatatcattgtgtcagttatacacactttgacattccttttctacattaagactggaatgaaatttttgatcctgaccagtcatcatattataacagtgaaacagtgccaccttttggacccaaacagaagcatccagtgctagtctttcaaacttcctttttcagttaaactcctgatgtacataaatgtcaatgattttcatgtcataattwtcaccttctaggaatactttttaatctatacaaaccaagaaaacattggggtaacaaaaaagttgcttaccaagatgcaaaatttcaaaatattccaaagtagtaccaaatgcatgtatttttaataatttctaatcaacatttcattaaatacatttcaccaaatccaaatatgttagtcaactaacatattttaaatgcaaaaaattctttttatagcattgttacactgcaaaattgattttttaaaaatgcattgtatttaacatgtattcaatttaataattggcaatatgatattaacagtggattaccagttaaatcagcataagtataaataattttatatacaaatatagtatgcttctgagttacttacaccaatgatacaatgtcaccacggtgtacttcaaaattcctcactttccagtggttcaaaagcaccacatcagatgactggctccccccaggattcaaagaaggctagaaaataaggagaaagagacacttctatcatttgtatttttcaatcttcatggttcttgcacttcacagctcgagtggactgaaataaaacatttctaatacagtacctttctataaattgctgttctaaagtaactgcaaatgatgagttttcaaaaaggctcactgggattcttcacagatgaaccagaaaaaaataaattaccaatgcttatttgaaaggaacgtgtgctagacattaaaatctttagtaaactccaataaagaggtatgaaaagccttaagaataatataaaaacatgaggaagaagtgagtcaaacctcctaacaaaatatccagataggatctaattccacagtagtacacatcattgttccatctggggaaaagaagaaataatcccaaatcacagtcatgtccacaaatcttcacagtcatatgaaaaactgaagggggcaaaagaaagatgtgataggattaccattataaaatgtatggatttcccactttgacctctcttttctcaaaagagcacatatcctaagggtcctggtcccagtttgagcctaataaggggctttcatcctaggattcagagaagtctaactgtgcctgagggttaatggatcaagaactgagaaacattttgtgtaagaatttttctaaaggtcaggaaccatacaggcacaaaaatttgactggggaactatgaaaccagcatacctgtcatttggacaggggtacagacaaagccaatgaataacaagcttgaggcaagaacagggggacaaaataattagaaaagctaagatagccttttcactgttttttaaattttttttcattttttatttcaataggttttgtaagaaaagacagtgttcggttacatgagttaagttcttcagcagtgatttctgagattctggtgcacccatcacccgagcaacgtacactgtacccagtgtgtaggcttttatccctcaccaccacccacattttcccccaagtccccaaagtccaatgtgtcattcttatgcctttgtgccctcatagcttagctcccacatatcagtgagaacatacaatgtctggttttccattcatgacttacttcacttagattaatagtctccaattcctttcagattgctgtgaataacattatttcgttcctttttatggctgagtaatatatatacacaccacattttctttatccactcgttgactgatgggcatttgggctggttccatatttttgcaactgtaaattgtgctgctataaacgtgcgtgcaagtacacatctttttcatataatgagttattttttcatataatgagtttattttcctctgggtagatacctagtattgctagggactgctggatcaaacggttgatcgactttagttatttaaggaacctcgatgctgtttttcatagtggttgtactagtttacattgccaccagcagcgtaaaagtgtttccttttcaccacatacacatcaacatctattattctttgattttttgattatggccactcttgcaggagtgaggtagtattgcattgtggttttgatttgcacttccctgataattaaagatgttgaagattttttcatatgcttattggccatttgtgtatcttctcttgagaattgtctattcatgtcctcaatccactttttttttttttttttttttttttgagatggagtctcacaccgtcgcccaggctggagtgcagtggcatcatctccgctcactgcaatctccgcctcccgggttcatgccattctcctgcctcagcctcccgagtagctgggactagaggcgcctgccatcacgcccagctaattttttttatttttagtagagacggggtttcaccatgttagccaggatggtctcaatctcctgaccttgtgatctgcccgcctcggcctcccaaagtgctgggattacaggcgtgagccaccgcgcctggcctcagcccactttttgctgcggttgtcctttcttgctgatttgagttctgactctccaataatgctaccatgggaagtggccatttctgtggtgacaggaaaggtgccaagcttcctctccgccttcactgaggggctgatgacagcagccagtggagacacaacaacaaccagggcagaagcaaggaaaatagtgaacgcagggcaacagccagtccctggagcagtaatgacgtgccttttgttaaagattcctgggattatttgcagattttctacaaagcaagagttgacaaatatgtcaaaattctgcatggaggctattatcttgacactatttttgatccagggttttgcagctgaaaaatactggttatccttgaacacctcaaacactttcagaactttcaccaactcctttagtgataatacctaaatccctaacttaaattccctgctactcatttcacttaactacctgacaaaaaattcaacaggattaaaatggaatttgttatcatttcaacaaataaatttttttttgagacagtctcttctgcttttctgcctcagcctcctgagtagagctgcgactacaggtgtgcgccactatgcccagctaatttttgtatttttagtagagacggggtttcaccatattggccaggctggtctcgaactcctgatctcgtgatccgcccgcctcagcctcccaaagtgctgtcattacacacgtgagccaccacgcctgccctcttttttttttttttttttttaagagggtctcgctctgtcacttaggctggagtgcaccggcatgatcatagttcactgtagccttgaactcctgggctcagtctcccagttccagttcccaggtagctaggactacaggtctacaagtgcataccaccacatccagctaagtcgggttttttttttcctttttttttttttagagatgggagggtcttgctatgttgagcaggatggtcttgaactcctgacctcaagcaatcctcctgccttatcaaccaaagcgctgagattacaggtaggagccaccatgcccagccctttcttattttcttacatccgggttacccttttcccagtcaaccagtttaaaaacttagttgtcttcttacttctcatccaaccagtcagcaagctaaagggatctttttttaatcataatgtcttctacttctggcacgttttctttcctctctagtatcatcatatttcaagcaccaatcattatgtaactcatgctatatctacactaatcagtctctcacctccaacttagaaatgattccatttctttctagttatatgatcttcagcaagttacttaacttcattatgccactcattactaggaaaatggtgatgaataataactattatctaattaataattaaataataatagccaatacctacgaagtacttaccatgtgtcctggtctaataataatagccagacatgttaagtgcttaccatgtgcaagacactgtttaacagctttacaaatatagttgacccttgaataacacaggtttgaactgcgtgggtccaacaatacacagatttttttcaataaaagttacactgagtgtgcctgcctctcctgcttccctttcccacctcttctacatctgccacccctgagacagtaagactaactcctcttctttctcctcctcctccttagcctactcaatatgaagacagtgaggatgaagtcctttacgatgatcctcttccacttaagaaacaaaaatatatttttctctttcttatgatgttcttaataacattttcttttccctatcttactttattgtaaaaatatagtatataatacatatagcatataaaaatatgtgttaatctcactgtttatgttaacagtaaggcttctggtcaggagcagactattagtagttaagttgtggggtgtgggacagtcaaaagttatatgcaaatttttaactgcatgggagttgggtccctcaccccctcgttgttcaagagtgaactgcgctaccttatttggtaagatcattcatttaaagtgcttatggtagttcttggcccatacttacctctcagtaacttctattattgatatttctacatcacaattttaattttaagcaggtctgtactctctacccccaggttcctcctatgtctctatctctagtgaggaacagagttgatatggtagcataagtccaaagggctttactgagccatggtgctgaggaatggagcttttgtcatcacaacagtaggtcagattattaaaaggtgagctttcacaagggtatgctctctatctcattcatatttctcattcaaattctctatctccctcttcctctctgtctttgacctcagtatccacaggtcctcttccctaatttatttgtattctttttcctatataactgacactgtaaaggtgacctggagggagaccatctgggctctggaccataaagagaaaatattcctattgaactttcactgcattcgttttttttttcttttttcttgccataatagtgaaggaacaaaaggtgatttaattatttctgactgttctccttggtctcttttactggtgttttttttgaagtttgtgaccacaactcataagatcaaaaatcccaagttcaccatcacagcctatgattatttctataataatatttaaatatgcattataatcactcccttgtctctctttccaagagtctataagctctttttttttctaagttttgagaataaattatttcctatgcctatatttttgagatcgagcactttgcaggtaattaacacattttagtggaaagaatttaaaaaaatcaattagtggaatttccaaagattttcaaaattaacaaggtcaaaacaaagatcctattccagcccactccagcccccaaatatacttcccctccttatttaacagtagtaccacttaccctatcccccatactagaagactcataagtcaggtccagtttctaacccgctctttggatgcctcattatcagacttcccctctgtcaagaatgttttttccccacttggaaacttctagtcatttgtcaaagtccttatctgatggggactcctctgtaaagcctttaaaaagaataaaaaacatgctgcagttcccttaaggaaattggaaaattatatcttggtgttccaacaatggggatagaaaaatccccactgacccaaattttaacttcgtctttcccttatagaatcactcaaatgcccaacttttctaattgtaattgttagaaccaaaaggtaaagcattataaacaaaagatttatgcaagggaagaaaacagaaggaagcatgtctaacttccaatagtgaagtaagtattagaatcaacagtcaacacctgaatgacattgcttgattttataaaggaagcaacagagttttcttttaccttttctttcctccacaagtttaaattagctactccctcatgtgcgctcccatagcaatgcaggtacttaataggtatctgcctacagataagactcttccactcaggtgtaagtttctcaactgctgaaaccgtgtcttagccatttttgtacacctaatcccagaacagtgattggaaaataatatttctataaagtctaaaagattaaaggtttttaaaagcgtatttaaatcagatagtttctagaatatacattatctaaataatgtatacatctctttcaatgaaaacatattctagataagtatagcaataaattttttgtgtctcatcaagttaggcaatttaagagttagaaatagttgaatagggctttgttattcataatgaaataatggtaatcacaacacaataaactatcttgtttatttattaatctaacacttatgaatatcaacaaaacatcataaagaaaaaccttcttgaattgggaagttgttcctatggcactataagaaccacagttttctgtacttcactaaaaacaaaagctttattaaaaagaaaaaaaacaggccgggcgcagtggctcacgcctgtaatcccagcactttgggaggccaaggtgggtggatcacgaggtcaggagatcgagaccatcctggctaacacggtgaaaccccgtctctaccaaaaatgcaaaaaaaaattagccgggcgtgggggcgggcgcctgtagtcccagctactcgggaggctgagacaggagaacggcgtgaacccgggaggcggagcttgcagtgagcggagatcgcgccactgcactccagcctgggcgacagagcaagactccgtctcaaaaaaaaagaaaaaaacagtggccggtcacggtggttcacgcctgtaatcccagcactttgggaggccgaggcaggcagatcatgaggtcaggagatcgagatcatcctggctcaacacggtgaaaccccgtctctgccaaaaaattagccgggtgtagtggtgggccgctgtagtcccagctactcgggaggctgaggcaggagaatggcgtgaacccaggaggcggggcttgcagtgagccgagaccacgccactgcactccagcctggggcgacagagcaagactccgtctcwaaaaaaaawatagagcaagcaattttttcaaatcgatgaagttaaacacatcaagtagaaattaaaagtcataaataataatttgatatggccacagaatctgtattttcttgttatattgttaatatttaaatcctagattccaagagactacatcaaaatataactaacttaaaataataaagtgtttgaagaaatctcagagaatatttaatctaggagtttccacctgtatctccaagtatttgattgtatcagatattcctgctagtagtcacagtgatttccagtagcaaaaggaaaaacactaacaaagaacaaaaaaagccaaacatctgctctggactgagtaagaaagacccaccctcacccaaggtgggcagacaccatacaattagttgagagcttggaaacaacaacaaggaagaggaaaggtaaatattctctgtctgtctctctcaacaacttgcattctcacactcatctatttctctgcttctaccatggaccactaaagttaaaaatcaaacttggagaagtgttttgaatagtccttgccctaaacacagaaaactatgttcaaatcttgtctccatttcttattaaccatattactttaaacagattatttaacctgtctcatttcctcatctataaaatggggactgactgcaggaacactgatctcatggagttgctacaagaattaaatgagacagtctacaaaacattacagtcatgaaacagagtagcagtcaacaaataggacactaatgatgatggcaacaataacaaaataaagggaaacaatatcaggtacagtatcctttccacaagatttaagaaaaattaaacatttaaatattgccctgcacatttctcattttacatagtaaactgaaagtattcaggcagaaaattctacccctcatttctaaattctttgttgattgtttcctcacttttttaaagcaagtaaagttaggatgcttttatgtggggccttaattgttctgcctctataaattaatccaaaaaaatttaatatgcataattagttatgaatacctataaaatacctaaagaattttacacccgttatgttttacattcttatttttaaaacatatacacacatacagatatatataaaaacatatgcatttaaaaatctaacagttcttagctctggttgatgaaatgatttccattttctccctccctactgcttacccctccccacaccttgttttcctctggctcagttgtatctcacaaattgttttttataatgaacatatatttagtttgtatgctttgctctgacctaagtactatatagttcactctaagaaatacaatataagtcagcatatttcaacagatgttagtaagttatgctaaagctagaaatagccaatatctatcaaatctgcttttggaacaagcataacacaaaagttaggctttaatcttttctctgatcaaagactatgctgaaggatttttatttgtcctacaaacaaatattattgtcaaggtatcctaaatcctcagcttgtgtctaacctcaaatcatatgacaggtttggaagaatttatctttcggtttacraaaataaaattctcctagagaattaagcacagtcacagtacacttcctgytttgtaagacttaactgaagccatcaatcaataaatgatattattctggctttttactataaattttttattcattttttaattttaaagaatctacagcctatgattcactgcctccaagatataaagaaagcctggttttgaccttacttctttgggtacaatgctttcaaccttttcaggcttataaaaagcaccactcacactggctacatacaatctacaacaggtaaatatcaaactttgtgcttttaagtgagatggagcccagctgcagccacaaggacccaacagtagccctcagacttcttttgaagaaccattactttgaagacatatctgtggaggcgggggcaataacagaagaaactgaaatagtactgttgatttagactttttaacactgcagcactggccaagaagcatgaagtaagtacagttaaagtaaatgtacattctgattaagaattattagatgtcacacctttgaaagaatgcggacaatatggtctacaatgccgtctttcttcccttgctattcaggggtctccataatttgcatggcttctagaattctcagatttgtctcactaggtgtgcataataaaatagactataatgtacccaggtctgtacaaagctgtaagttagaaatggaacattccttttatatcatgggtacttattacccataccccttctgatggttaattttaggtgtcaacttgactagattaaggctacccagaatgctaagaaagcattattctgggtatatctgtgagggagtgttcccaggagagattggcctttgaagcactggattgagtaagaaagatccaccctcacccaacatgggcaggcaccrtgcaattagttgagggcttggatacaagaacaaggaagaggaaaggtaaatattttcatattctctctcgctctctctctcctgacgctgggacaaccttcttctctttccattgcaaatcttagaactccaggtcctctgacttttagactctgggacttgaaccagcagcccccaggtctcaggcccttggccttggactgagagttataccatcagcttctgtggttctgaggccttcagacttggactgagccaagctacctggacctccagcttgcacatagcctataatgaaacttcttagcctccatgatcacatgacccaattcccctaataaattccctctcatagatagatacatagatagatagatagatagatagatagacagacagacagataaatatcctattcgttctgtctctccggtgagatctaattataatataatttcttaatttttcttttaaaagcaagcctgtaaaactacattaataaaataaaagtgaacatataacatattgatttaattcagaattacactaggttgttaatttttcattctcctaatcttaactgcatgttctactatagaacgccccatcaaagtgtcacaggcacgctcacatactacctgtaggaatgaaaatctttataaactatcaacaaggtaatttgccaaaatatatttaaagtcttaaaagtgatcttgtccttagacttgaaaatgtcacatttaaaaagatttcctaagaaactaattggacatatgtgcaaaggaacatatacaaagatattcataatacattatttacaatagtgaatagcttcttagtcttttagctaaaatcaagtgaataactgagccaagctcaataccaataataggaaactgattaaaccttggtttagcaatggttaaactttatggatattaaaaaatgattgtaaaaattacattgtggaaaaatatatatttggatatgtctggagaataagtgaaaaatgcgacatagaaaaaacaaactgctatgatccaatttcaggaaagacaggacggaagaaaaaagggaaaaaccttaaaagaataaagtaaagaaggaaattgtgcagaaaagaaagagagtaacttataatggtttagaaatgcaaacttcraagtcagaagctgggtttaaatctatgcaatcttcagtaagttatcccatctctctgattgtatttcttcatctgttaagtgggctaacatagtatcttcatcatacagttgtgggtgatattaaataaactaatatatataaagtcaatactgtaatgacttgaacatagtgatcattcaataatttttmactattagtattatataataatatatttaaaataaataattctgaaaggtggtatcaattatttattttccacatttttctatgttttctaagttttttgccaatcaatatgcagtgcttttatattaatgtaagcactaagcaatgaattgtttttgaaggggaaagcatctgatttttatatcctcttattactaatatttttaaagtttgtgttctttaaacaagctcttcagtatttaagcatctctttaattcaggtcgctacaactagattgcaaggttcaaatctgcaaagtttctgtttcaatgcactaattataaaatactaccattaaatacgtgcattgtgtttcctagctaataaaacatgttttgagatagctattctaatttatagttctaattaaccatatcagaaatagatcacatatagtcaatgaaatataaaatttatataaacatatctgcatattaacctgaagacagactgctatatataaaataagccagctacacggaaaaaccccagcaagatacatgcggaatctttaacttcctcataaaactgaataaggctttcctattcattgctaagtttttcttgctcagaaccacttttctgtctcctaacctaattaaaaaaaaaaaggtcatagtaaggtgtgtagcacagaaaggaagtgattcaacaaataacaaagattttaggaggctgcatgattccctcagaagcatgtaactccaaagaggccaaattccccaacatatacaatggtgtagcaatctattcacatggcttatataatatctgtgaacaaatctgtgaagataataccatggattttagatcctttagttcttcattgttgaacctgatgctgcattataaggaaaaaaataaaaaagaaccagtcagcatcctaacactacaaatgtgtatcaacaggaattttggtacctgggtaccctaaattacattgatcaaagctataagaacaaaggagctcaaatgcataggaaacagcttatcaaaaggaactgaaaagcattctggcagataaaaagggggaaaaaaggatatataccttatatcatttatctactgctacaaaacaaaccactccaaaacttaaaacaaaaatcatttattggttcatgattccacaatttaggctatgcttagctatgcaattagccagcttgtctggctgtgatcactcaggcagctgcagccatggaggcagcagtgttccaggagcaaaaactccctcgtgtaagcatctaccaagcctctgtttgcgtatttgctgatattccaccagccaaaatgagtcataaggccaagtcaasaatcagcataggtgaggatgacatagagctcagtaccgaggagcatgactcatgggggatggggtagacagggaatatcaatgtaataatctaccaaaactctgccctctagctccaatgaatcatatccctcacatatgcaaaatacatataacccttcctaagagccccaaggtctcctcagatgtttgcaataggattcatatccgttaattcatgatatgcatcaggtcccaggtcccagtatggaagaggactctagggtgcagctcatctcaaatcagagacttatgaagtgaaaagataaattatctgttccccaaacaccaaacatataatggaaagacagaaagaagataaccatggattttaaaaagcaatgaaaaaagcatagaagtcacttgtccatagaaagcttaaaatccagcagcatgtgttgtcaaggcctcccatctcatggagagaaatgtcctttaattaagattcttttctgttctctggaatggttccctaatttattggtctgcatggctcttagctctgccctctgggctttgggctcttttttaaaaaggaggcccggtggagccaagatggccaaataggaacagctctggtctacagctcccagaatgagcgacgcagaagacgggtgatttctgcatttccatctgaggtaccgggttcatctcactagggagtgccagacagcaggtgcaggacagtgggtgcagagcaccaggcacaagccaaagcagggtgaggcattgcctcactcgggaagcacaaggggtcagggagttccctttcctagtcaaagaaagaggtgacagatggcacctggaaaatcgggtcactcccaccctaatactgcgcttttccaacaggcttaaaaaaacggcataccaggagattatatcccgcacctggctcagagggtcctatgcccatggagtctcgctgattgctagcacagcagtctgagatcaaaatgcaaggcggcagcgaggctggggaaggggcgcctgccattgccgaggctcgattaggtaaacaaagcagccctgaagctcgaactacgcggagactaccacagctcaaggaggcctgcctgcctctgtaggctccacctctgggggcagggcacagacaaacaaaaagacagcagtaacctctgcagacttaaatgtccctgtctgacagctttgaagagagtagtggttctcccagcacacagctggagatctgagaaagggcagactgcctcctcaagtgggtccctgactcccaagcagcctaaatgggaggcatccgccagtacgggcagactgacacctcacatggccgggtactcctctgagacaaaacttccagaggaacaatcaggcaggagcatttgcggatcaccaacatccacttttctacagccaccgctgttctgcagccaccgctgctgatacccaggcatacagggtctggagtggacatctagcaaactccaacagacctgcagctgagggtcctgtctgttagaaggaaaactaacaaacagaaaggacatccacaccaaaaacccatctgtacgtcaccatcatcaaagaccaaaagtagataaaaccacaaagatgggggaaaaacagagcagaaaaactggaaactctaaaaagcagagtgcctctcctcctccaaaggaacgcagctcctcaccagcaacggaacaaagctggacggagaatgactttgacgagttgagagaagaaggcttcagacgatcaaactactccgagctacaggaggaaattcaaaccaatggcaaagaagttaaaaactttgaaaaaaaattagacgaatggatacctagaataaccaatgcagagaagtccttaaaggagctgatggagctgaaagccaaggctcgagaactacgtgaagaatgcagaagcctcaggagccgatgcgatcaactggaagaaagggtatcagtgatggaagacgaaatgaatgaaatgaagcgagaagggaagtttagagaaaaaagaataaaaagaaacaaacaaagcctccaagaaatatgggactatgtgaaaagaccaaatctacgtctgattggtgtacctgaaagtgacggggagaatggaaccaacttggaaaacactctgcaggatattatccaggagaacttccccagtctagcaaggcaggccaacattcaaattcaggaaatacagagaacgccacaaagatactcctcgagaagagcaactccaagacacataactgtcacattcaccaaagttgaaatgaaggaaaaaatgttaagggcagccagagagaaaggtcgggttacccacaaagggaagcccatcagacaaacagcggatctctcagcagaaactctacaagccagaagagagtgggggccaatattcaacattcttaaagaaaagaattttcaacccagaatttcatatccagccaaactaagcttcataagtgaaggagaaataaaatactttacagagatgcacatgctgagagattctgtcaccaccaggcctgccctaaaagagctcctgaaggaagcactaaacatagaaaggaacaaccggtaccagccactgcaaaacatgccaaaatgtaaagaccatcaaggctaggaagaaactgcatcaactaatgagcaaaataaccagctaacatcataatgacaggaccaaattcacacataacaatattaactttaaatgtaaatgggctaaatgctccaattaaaagacacagactggcaaattggataaagagtcatacatcagtgtgctgtattcaggaaacccatctcacgtgcagagacacacataggctcaaaataaagggatggaggaagatctaccaagcaaatggaaaacaaaaaaaggcagggattgcaatcctagtctctgacaaaacagactttaaaccaacaaagatcaaaagagacaaagaaggccattacataatggtaaagggatcaattcaacaagaagagctaactatcctaaatatatatgcacccaatacaggagcacccaggttcataaagcaagtccttagtgacctacaaagagacttagactcccacacaataataatgggagactttaacaccccgctgtcaacattagacagatcaacgagacagaaagttaacaaggatatccaggaattgaactcacctctgccccaagcatacctaatagacatctacagaactctccaccccaaatcaacagaatatacattttttttcagcaccacaccacacctattccaaaattgaccacatagttggaagtaaagcactcctcagcaaatgtaaaaaacagaaattataacaaactatctctcagaccacagtgcaatcaaactagaactcaggattaagaaactcactcaaaaccactcaactacatggaaactgaacaacctgctcctgaatgactactgggtacataacgaaatgaaggcagaaataaagatgttctttgaaaccaacgagaacaaagacacaacataccagaatctctgggacacattcaaagcagtgtgcagagggaaatttatagcactaaatgcccacaagagaaagcaggaaagatccaaaattgacaccctaacatcacaattaaaagaactagaaaagcaagagcaaacacattcaaaagctagcagaaggcaagaaataactaaaatcagagcagaactgaaggaaatagagacacaaaaaacccttcaaaaaattaatgaatccaggagctggttttttgaaaagatcaacaaaatcgatagactgctagcaagactaataaagaaaaaaagagagaagaatcaaatagacacaataaaaaatgataaaggggatatcacaaccgatcccacagaaatacaaactaccatcagagaatactacaaacacctctacgcaaataactagaaaatctagaagaaatggataaattcctcaacacatacaccctcccaagactaaaccaggaagaagctgaatctctgaatagaacaataagaggctctgaaattgtggcaataatcaatagcttaccaaccaaaaaaagtccaggaccagatggattcacagccgaattctaccagaggtacaaggaggagctggtaccattccttctgaaactattccaatcaatagaaaaagagggaatcctccctaactcattttaggaggccagcatcatcctgataccaaagcctggcagagacacaacaaaaaaagagaattttagaccaatatccttgatgaacattgatgcaaaaatcctcaataaaatactggcaaaccraatccagcagcacatcaaaaagcttttccaccatgatcaagtgggcttcatccctgggatgaaaggctagttcaacatacacaaatcaataaatgtaatccagcatataaacagaaccaaagacaaaaaccacatgattatctcaatagatgcagaaaaggcctttgacaaaattcaacaacccttcatgctaaaaactctcaataaattagatattgatgggacgtatctcaaaataataagagctatctatgacaaacccacagccaatatcatactgaatggacaaaaactggaagcattccctttgaaaactggcacaagacagggatgccctctctcaccactcctattcaacatagtgttggaaattctggccagtgcaatcaggcaggagaaggaaataaagggtattcaattaggaaaagaggaagtcaaattgtccctgtttgcagatgacatgattgtatatctagaaaaccctattgtctcagcccaaaatctccttaagctgataagcaacttcagcaaagtctcaggatacaaaatcaatgcacaaaaatcacaagcattcttatacaccaataacagacaaacagagagccaaatcatgagtgaactaccattcacaattgcttcaaagagaataaaatacctaggaatccaacttacaagggatgtgaaagacctcttcaaggagaactacaaaccactgctcaatgaaataaaagaggatataaacaaatggaagrgcattccatgctcatgggtaggaagaatcaatatcgtgaaaatggccatactgcccaaggtaatttatagattcaatgccatccccatcaagctaccaatgactttcttcacagaattggaaaaaactactttaaagttcatatggaaccaaaaaagagcctgcatcaccaagtsaatcctaagccaaaagaacaaagctggaggcatcatgctacctgacttcaaactatactacaaggctacagtaaccaaaacagcatggtactggtaccaaaacagagatatagattaatggaacagaacagagccctcagaaataatgccgcatatctacaaccatctgatctttgacaaacctgacaaaaacaagcaatggggaaaggatttcctatttaataaatggtgctgggaaaactggctagccatgtgtagaaagctgaaactggatcccttccttacaccttatacaaaaattaattcaagatggattaaagacttacatgttagacctaaaaccataaaaaccctagaagaaaacctaggcaataccattcaggacataggcatgggcaaggacttcatgtctaaaacaccaaaagcaatggcaacaaaagccaaaactgacaaatgggatctaattaaactaaagagcttctgcacagcaaaagaaactaccatcagagtcaacaggcaacctacaaaatgggaaaaaattttcgcaacctactcatctgacaaagggctaatatccagaatctacaaagaactcaaacaaatttacaagaaaaaaaacaaacaaccccatcaaaaagtgggcaaaggatatgaacagacacttctcaaaagaagacatttatgcagccaaaaaacacatgaaaaaatgctcatcatcactggccatcagagaaatgcaaatcaaaaccacaatgagataccatctcacaccagttagaatggcratcattaaaaagtcaggaaacaacaggtgctggagaggatgtggagaaataggaacacttttacactgttggtgggactgtaaactagttcaaccattgtggaagtcagtgtggtgattcctcagggatctagaactagaaataccatttgacccagccatcccattgctgggtatatacccaaaggattgtaaatcatgctgctgtaaaggcacacacacatatatattgtggcactattcacaatagcaaagacttggaaccaacccaaatgtccaacaatgatagactaggttaagaaaatgtggcacatatacaccatggaatactatgyagccataaaaaatgatgagttcatgtcctttgtagggacatggatgaaactggaaaccatcattctcagcaaactattgcaagaacaaaaaaccaaacaccacatgttctcactcataggtgggaattgaacaatgagaacacatggacacaggaaggggaacatcacacagtggggactgttgtggggtggggggagcggggagggatagcattaggagatatatgtaatgctaaatgacgagttaatgggtgcagcacaccaacatggcacatgtatacatatgtaacaaacctgcacattgtgcacatgtaccctaaaacttaaagtataataataataaaattaaaaaagaaagaaaggaggccaggctcacacctgtaaccccagcttcttgggaggcgggaggatggctccaggccaaaagtttgagaacacctgggcaacatagtgagactgcctccacacacaaaaattttaaaaattagctgtccaggacttcgaggctgattgcaccaatgcactccagcctgggcaacagagcaagaccctgtctctttaaaataataataataataataataatataaaaataaataataaatttttaaaaagaaatgctccttcataataaggtggacacaccccagaggtctctttctaaattgaccccattttagtacaagttaattcaacacccttaaaatgttgtagacttcccattaatctagttggggctcattccattccccccaaaactacatccatatcttccttcttttttctttttcttgccctgtcccccaggctgcagtgcagtggtgcaatctcagctcactgcaacctccgcctcccaggttcaagcgattctcctgcctcagcctccagagtagctgggactacaggcacatgccaccacaccaggctagtttttgtatttttagtagagacaggttttaccatgttggccaggatggtctcaatctcctaacctcgtgatccacctgccttggcctcccaaagtgctgggattacaggcgtgagccaccacgcccgacccttaatttttttcaaaccagatctttctttactttgaaagtgtcaggctgctgtggcacaaagccctgaagagtttacaatatattttgtctaattaaaaagatatactaagtaccaccttatatctttctgaggttttttttgtttttgcttttgtttttgtttgagacagagtctcacggtgtcacccaggctgaaatgcagtggcacagtcttggtttattgcaacctctgccttctgagctctggtgatcctcccacctcagcctcccaagtagctgggactacaggcgcatgccaccaagcctagctaagttttctatttttagtagagacagagtttcgccagttgcccaggttggtctcaaactcctgggctcaagttatcttcaagccttggcctccccaagtgctgggattataggcgtgagccactacacccagccctgaggtcttaataaagagtcttccagtcctgatttgatctctacccgaggctatttcttattttgaggatcttttgcctgctagatactgggaatgaaaaatagttttattttccaacccaaaaaagttctgggcaccctatatttcctctaatttctgctataagttcatttctctcttcccatatcttatataaagctatacgaagccagctgacaatttcaatattttcgcctggaaatctccttagccaaatctataagatcattaggtatatcttctatttttcaagttcttacagttcacatttttaaaaaatgtttaagtaccataaaacacagatcatcgtaattccagtccgcagtaacagatactttactatctttctgttttctattaacagttgtttgccatttgtccagcgtctgccaacactcccctcaccacattaccagccccaaactgccacccagtccccaaatcaatgctacatattttaggtttttgttatagtatcacttcactaatagtaccaatttttgtttcagttatctcttgcttcataacaaaccactccaaaactatatgtctaaaaagaacaaccaaaatgtatctgcttgtgatcctgcaattttggcttccctcagctggaaagttcaagatggcttcattgacatgtcaggcactcaactggggctggaaggccaggatgcttcatttattctccaaaatctccgtcatcaggatagcctgagtttttacatgtacccagctcacaagtactgaccaagctcctacttgagcagtatttgcttatatcctactgaccaaaacaagtcacatggtcagagtcattgtgggaggaaactacacaaatcaatgagggaggcctgattcactatggaatcattaccataaaaatctacacatatctcatactaaatgaatgggccatccattcagctgacaatcttgtgactgtgctttctgttgatcattttaaaagctacagaaataaaagatagtttatattttaaaaagaaagaaaaaaattcactgacaaaaaaataaaaattttaaagataactaaatagtcttaaaagcaaatgacaagctaaaaagtataaaacaggcattttaaaaaataaaattaaaaaagtttacgaagaaataaaaataaagttcataaaatagaaaaatgtttaattaaaacttaaaaattaaaaaaagaacataattataaaatgatatacccattggtataatattgttgtggtctttctactccttagctcaggtaggtccgagttcttgtcgcacaaccaggaagaattaggcatgcagacaccagagagtcagtaaagtagaatttaacaggcgaaaaaggaaagctttcagccaagagagggcacagagggtgggaggggtatggttcccctatctgaaggcagggaagtccccagtgtggctgggtccagggccttttatatactcagaatggggagagtgtgttgattggtttgtgagtatgcaaaaaatgttaaagcaaagacaccactcaaaggtgggcacgacagagtagaaaaccaattaggaaagggtaggtatatgtkaaataggtgaatggtggggatctatcagaggaaatcatgccaaataggcaagttctcaatccagtctgaggatgtaacttgtagcttggctttcaggctttaaactgtcttgggcttggaaggggggtttcactggggacccaccctatctgcctaggcatttggctgcttcctgccactctcaatattagaaacaataagctaaaattagcacaaatatatgataaataatttaacagacaaagagatgggaaataaaacaaattttttaaaagttataagactaagaattcaaaagtttagtaaacaaaggcaatcaggattttccaagcaaaagcaattaccatgtctagcaaatcccccaacaatttgccctcacccaagacatggagctctccttaagaaaatggttctcaaactttagtatttacagagtttgttaatgcagattccaaggtcctcacaaaacgattctaatttcataggtctgaaatggggctcattaatcttcattaataagtaccccagattatgtaataaaaaaggcccaaggaccacagcagctacaaaagggttttctcaaacaagggacagactatggggctccttatccttcgtgttgcacttattgcttgaagtgcttatgacaagcccacatttaaaatttcagaatcaaaagttaacatgctccactcccttagttatagctcaatttgagctgtctcacccttgtaagcttccctccagcaataaagcagcattttgcaaactacaggtcacaaccaatgagtgagtcagaatcatcaatttaataggttatgaccagaacagaaaatatcagagggcattgcacataatgatagtaattacaatttaagtattgttacatgaaacttttgttccagttgcatgtatgtgtgtatagtgcaaaatatattacttaatatgagtcatgagcaaaaaggtttgaaaatctctgccataaagaatatgatgaatttgtcaagaagctaaaaactttttaggagaatagttcaccagaaacaccctcaaagtctaagaaaaaaaaaattttaatgatcataatttcattttatcatatttctgtagggtttaattattcaggcatatcaatgcttcaaagaagaaatttcatatgcatttattccagcatccctctgaactagcaggtgagaggattatggtcccctttcttttagaaacttacagagtagagttattattaacccatgaaattaataattagagggcagtacaaaaggatttataatcatgagttaaacttacaatgctgtaggatttctaataagtgaatgacagaattaaagaaagttacatgaagaaaatagagcttgagtttagacttaaagggaacttcagaaaaagcagaggagaaaaggtataataatgagtcgtgttatacagtcagaataggctaaatgcttgtaaaaagaatttcaaaagctcagtggtataacacaatagtgagtggactgactccacacaatcattcagaaacccagttttttcgagcttgtacatctaccatcccctgcggcatcgtgtcctcaactggatcctctgctgtattgtattatatacatacatatacataaatatagatatagatattgatacagatatcaaaatcagtatagatatcctgtatattatgatgttttgacacgttaaaaaaaacattcctagctggggagacactgcctctgccagacctagccaattcttccagctagcaagagctcaaccagaagcatgcctttcatatacaaactaaccaatccagaaccatacctcctccagccagcataaccctggagacaatttcctctgccttcatcttcccaaggccaggtaccaggcaaccagggaccacccctacagcttagaatctgccaaaattattcaaactagccagtcctaaactgttcattctgccctgccttgccttgccttgcctgcacagaaaccccaaaaaggctttggcctagctgctattgtcatctgcttcctgaccactctggtgtctttcccatgtggccccacataccgtgctttaccttcctgtctctaggacctgtaagtctaataaactttgttttcctgagcctctcctctgtctgctctagtggccatacctaactaaccaactcataaaagaatacaaaacatctgccttcagccagcagacagaggagagagcatggaggatcacaaagatttttcatgggccaggcctaaaaatggcacttcacttcctcccattttccactggccagacctcagtaacctctgatatcaggaaagattaaaaaacaggacaagaaatcatccattcatcattagtcatccctcttacaactaaaacaccctgaacataacaccacacacaaaaatataggaggatctgcaaggtggaaagaagataaactagaggctaggaaccacaggacttgagaaatgacaccatcgctcccctggactttctttttgcttctcatatatcctagatcaggcactagggaatcctgcaacctgtagctaccaacaggccaagcaaaaaaaagggcctgaagacgtggtggccaacacctgtaatccagcactttgggaggctgaaacgggcagatcgcttgagctcaggagtttgagaccagcctgggcaacatggtgaaaccccatctctaccaaaaataccaaataaaattagccaggcatggtggtgcaagcctgtaatcccagctactcagggggctgaggcacaagaatgtcttgagcccaggaagcagaggttgcagtgagcggagatcgcgccactgcactccagcctgggcaacagagtctccctctgttgaacaaaaaaaaaaaaaaaggccttaagaaaagcctactctctctagccaaaggaccaggaaaaggaagacctagcagaacagaaacatttttgctaataaccatcctaatccagtcaaacatcaaaggaaaaactaccccaccccatcccccaacaccatggtgtcagcagggcccagcaaggagctggacttctaaccccactcagcaattaggagatggggcaagtaggcccttcacttccccgtatcaggtgtcaaagaggtggaatgagagtgcaagtggtgccagttagcagcccactttccccaccccagttagttgagcaatttctttagaagttaaacataaatgtaccatgccactcagcaaccccactattacgtatctgcccaagagaaatgaaatcatgtatatacacgtaactgtacacaaatatctatagcagcattactcacgataatgaaaacatcaaaacccaaacatttatcatctggtgagtggagaaacaaaatgtggtatattcatacagagaatactttttgcaataaacagacacaaaatgctaatacatagtacaacatggctaaacctcaaaaaaatctagtaagtaaaagagccagtcaggaaaaaccacattagtatggttctatttacaggaaaggttcagaaaaggcaaatctataaatcagatcagcagttgcctaaggaaagagatgggagtgaggattaacttcaaacaagcataaggttcctttctcaggtgatgaaaatattttaaaaccgggttatggtaatgattgcatgactccataagtttacttttaatactatttattgatattttattatataaaacataatttttaataaaaaattcaagtcatcccaaagcgttctacagattcaattgcactatctttaaaactctgatgtcatttttcgcagaaatacacaacacaatcctaaattcatatggaaccacaaaagaccctgaatagccaaacaatcttaagcaagaagaacaaagctggaggcatcacactacttaactcaaatgcaaaattatagtaatcaaaacagtatggtactagcataaaaacagacatatagaccaatgtaatagaatagagaatccagaaataaatgtacacatttatgaaaaatcaattttcaacaaagatgccaagaacatacaatgaggaaagaataggttcttcaataaatggtgcttggaaaactgaatatccacatgaagaagaataaaatcagacccttatctcacaccatatacaaaaatcaactctcaatggatttttaaagatgatgcctgaaactgtaaaactacctgaaactgtaaaactactagaagaaaacatagggagaaaagctccatgacactgatctgagcaatgatttgttagatacgaccccaaaagcacaagcaacaaagcaaaaatagacagctgagctcctatcaaactgaaaagtttctgaagagagaaggaaacaatcaacatggtaaagagacaatctatggaatggaagaaaatatttgcaaaccatatatctaataaggggttaatgtataaaatataaggtacacaaacaactctatagcaagaaaacaacttgattttaaaataggaaaaagacctgtatagagaattctcaagacatacaaatggcccagaagcatataaaaaatattcaatatcactaattatcagggaaatggaaattaaattaaatgtgcaatgagatgtcacctcatacctgttaggaaggctattatcagaaattcaagagataaatgttggtgagaatatgcagaaaagagaacccttgtgctctattggtaggaatgtaaattagttcaaccattatgaaaaatagggatatatctcaaagaattgaaaacagaactaccagatgatctaccactctcacttctggatatgtatccaaaggaaatgaaatcagtaagtcaaagaaatatcttcactcccatttcattgcagaattattcaaaacagccaagatatggaagtaacctaaatgctcataaatggatgaagggataaagaaagtgtagtcagtgtgggtgtgggtttctgtatatatatgagtgcgtgtggatattcttctgcaggtgtatatatacacacacacagtggtatatatactatgaaatattattcagcttttaaaaagaaggaaatcttgttatttgtgacagtgtggatgaacctagagaacattatgttaaatgaaataagccaggcacagaaagacaaatactgcatgatctcacttatatgggtaatcaaaaaaagctggactcacagaagcagagagtagaatagtggttgcaaagagctgagaagtagggaaaatgagaagatgttggtcacagtatacaaagtttcagttatgtaggattaataatttctggaagtctaatgtacagcaaggtgactatagctaataatactgtattatacactcgaattttactaagagagtagatcttaaatgttctcaccaccaaaaagaaggtaactatatgaagtaaagggtatgttaattagtttgtggtaatcatttcataatgtctacacatatcaaaatatcatgtatactgttctcactcacaggtgggaactgaacaatgagaacacttggacacagaatgggcaacatcgcacaccggggcctgtggtggggttgggggatgggggagggatagcattaggagatatacctaatgtaaatgacgagttaatgggtgtggcacaccaacatggcacatgtatacatatgtaacaaacctgcacattgtgcacatgtaccctaaaacttaaagtataataaaaatatatatatatcatgtatactttaaatatatgtaattgttgccagtttacctcagtaaagctggaaaacatcattacatcacttacaatgggtaaattcaatggtatataaattatacctcaataaaaatgtgttttaaaaagtagatggactggcataatgaaccaccatgtaatccatcacctagagccaacaattatggattcatagccaatcttgtttcatctgtaacccttctacttttattcttgccatattattttaaagtacatctcagctattatgcatttcactgcaaattttataatattcatactatgaggataagggttttttttaacataacagcagtaaataccattatcaccccaaaaaacaatgtatcaaagcacaagtgatataagtagtgctttgcttgaccattttagataatctcttgttgctttctgctattttcattctcctctctttctttcaactacatttagtatctgatagctccaatttctaaagcctttaaagtctagttcggctaatggttgcttctgactctcacttacagagctcattttctcatgcaatatttttactgggatataatgttcatcaaactttatctttgggattctataaggcctggttgcaagctgcatgtgcscagggaatttggtgcctgaggctgctctaaacccaggccactgtaaattaatatctcagtttagggtttttcaggtgcagtgaatgtgaattcaaacctcaattccacatcagggctttctctctcagagcctagacaatttttcttacagaacagatttttgctttagtctacccatttcctaaagatgtgtctcttctatggtcctgactttattaagaatttctgttccaatttcctgccttctatgagcctatggccttgtcttctgatccccatgtggccattgaaaccaaaagctctaaatgaccaggaattgacaaatatccatgtgacagctactgactttaatgtatacttactgccctggaaatgtattcccccttattgtggtctctgagaatttcccttgcttccctgcaagttagttacacatttttaaagtttttaatgttttgtttttaattttttaagagttttgcactgggaatatttcaagatgtttcatctgctatatttccagatagtctaatcccttcttataaactttaaaatctttagactttttataagagaaacgtatcttccatcaacctgagcggcacagtttaaaatctttttcccccattataacataaagcttaatttctatatttaagtcctaaatgtactacagaatcataccaaaattaaataacttactaagtacatcattccataaaccaaaataaaatggaataaaacatcactgtgagaaggaatagtataaacaggcaccaaaacagtgacaaggcacaacttttattagttattatttagtgaaatggacagcactgtcagagttggttcaagccagagttccaaaattcaatgattgtctgagcttacgtaaagtacctcaactgtctgagcctcagttgtttcaaatgtaaaatttagaacttgagtcatttcttaatgtatttaaagctctatactactatgaataaagtgttaaattttaaaatcagctgaagaaaagcattaatataccaatcagcaagcatcgtgactcaggaagaatgtacaagagtatcaagaattaaaggggcatgatgtatgcaacctactttcagatggtttaataagattttttgagggtatatattcatacacgcataaatacagagggagaggaagaggagggggaggaggaggaagagagagagaagagggagggaaaaaagataataaaataaatatactaaaatattgaaactggtgtatctgggtagagaagccataggagttctacgcactactcttgcaacttttgtgtaaatctaaatttacaacaagtttttaaaaagtgtaataaagttggtatttaaataacagatataaccctggctatataaaacagaaacacatagttattctatcatgggaagtgaagaaaaatccacaaagggacattacaaatttatcactcaccaactgtttcaggaacacacgtttgttgctataaatacaaagtctctattaatgacaggttacagaactatgtaaaaactcataactcatcctaaggggtaaaacatcaggtgagatttctgagccaaaagtaatttgggcagaaagcacgcaagtaagccaataaagcattccaacattaaatcctgacttcctttgacgtcagccccagcagaccaaggtgagtgacgacacagagaagtcagcacaggaggaaatgtgtgccagcttgtgcccagtatcttggaagtgcaaatttascaggtaacataaaactccataactctatcttaaatgctggtatataaatcacaatgtatctcttttcttaagagtctgtatccagcttctcagagttcaaaataagttacaagcaataatgactgttgagtattattaagctgactgtaggttaaaattttttaaaaaaaacatagattgaaagagagcttgctttttgatgatacttttaatttcaaactcagcaggaaacaagataatcacaggtagctgaaagtcaagacaatttaaaacccataaatgtatgttattgatgaacaaagacctcaatgctaattaaactgcattttccttcatattctgtaatttcctaatatattctgcatacattatctctaaggtctgacctagagatacagtattgtgtagcagtgttttcaagtatttttgccctctggccatgcaaatgaaaaaaggaaaatggtacactatgtaaaaattatgtatcaattgcaaaaaaaaaaaaagataatgacacaaaaytatttattttacttactttttaaagtcttaaatcttagttttaaatgtggaaagcatataccttttatcaggaccagtgaccccactgcaggaattctcactcaaataaaatctaaaactttggcatgaggtcattaaactrttcctagggcacccttttacgctaaaagcctctgtaagcgattaaagttctaatttgaataattacattccacctacataaattccctctgtagtttcaactgtatgcaatatcagtcttcatttcctgaattaaattaatgtcgtgtaatgtggtgcttcttttttaaaaaaagaagtacatctactttcataggtaacctttcagcaaccagtaaaagtgattcatgtgcatgaggggaataggtcagtatgaataatcattaaccaacaatttgtgccagcatttattgtgtcgagcattgcaaaagggacaactcatataatgaaatgaatgcagctatacggctttataaaaatcaaatattttataaactaaatcctattttccattgaatttaccaatgcatcattagaaactttattttttatttatggcttgcctttaattagctgatacttcccatgtttgatcacccttatctttctagtcaaatacttaatgaattgcaaattaatactgaaaatcctaacttaaaaaaagaaccactgagtagtgtttaaaaagtaaataagtatttctcatagagggaatcttaaaaacatgcttcccctaatcacaaaccaacagaatttttgaaagaccgaaaaacaattcttacagcaaaatttgttactcaaagtgaatttccagtgtaaccaaaacagtatttattcaataaacccaaaagactagtattacacctccctttaatgagatttaatctttcgatccttggatatttcttaaataatgtgtctaccagttgctgagtgaccttcaagagtggcttttcccagagtaaagaaaaacagctgtgttccttgcaggatgctcagtgacttccagagatctccacaccatgccaactatttcagtccttgagtcattagagaaatttaaagagaagaatttatcccaattgtcaaaaattctgttgaaccccatgacataaacgtgtttagttgatcaaagctgtatagtagcaaagatgtcttcaaatatgttgaattagttaatccctaaatctcattattataatttctgctcttaaagaatttaaagtatgatttactggcatctagtgaaactgtaaattaaattatctattatacctagagttggtctcaaattcatgaaatatagayccaattgtaaaaacatattttcctttcttcctagaattccattctactttgattctgaaaatagcatcctctttcctctaggaaatgtcacctgtactccaatccccaattcccacagaacaatgtgattcaaagagatgctgtcattttcttacagatcacttggcctagccacaggcttggggtgtgtacttgttcaaagctggaccaatcacggtaccccattctggtggccaaagttgatctgtatagttgtatagataagggcatgtgacccaagctgaatacatcacagtccttccccaagatattccacactgaaatcaaggcagtaggagcaatctctctcaggcggtgaagaaactgggcatgcgagctgccagcagccatgtaccctgctatgcagagaaaactggtctgagagaactaagccaagatgcagagaagaacttaaaaaagacggagcactccagcggcatccaagtcctggctctagttgtccctgacaactgtctcactcgtgccttccttgtgtgtatataataagccttccaataaatcccctttataccaagctattttcctattaccagtagccaaggaaactatacaatataccaaacaaattctaacataatacatttgacttcttagggatagggcctaggaatactgcaagaaatcctaatacctctgcaaattcaaatatatctaatgcaaacctgggtttaatccatgaaccgacatttagaaataacatgatttaacactttcttcactgccttcttcactggggataagccttgtcctttcataaggcagtcaaggtcttgtgagcaagacctgtatcttatattttgcaatgaattgctctctcagcacaagccatgaacatagatgttcagtaggaatatattaggctaaaaatatgaagattgggatattatgattgccacatgatcctctggaatatcatcagatccaaagtaaggagattttgtgttctggaaaagtccttcttagaatagtgatagytgtatagcaagacagcagtaacaaaattgggggaaaaaaaatcattcttaaactgattatttgttaccaaaagatacatgcttgtgaatggattcaaagggatccttgggaccaaaaaggaatgtgggtggctgtgaagaaggcagttttaatctgaaatgaagaatctgactccaaagctcagcaaagaaagtctacgtttccctaaggattgagtctaagacaaggctgctaggaattcaagattaaagaggcaacgaatgtaaaatacattctatcttaaacatattaaagtgtatttaaagccatatgcctataaatctttctttctatgtttactgtacccctacattaagatattttggcattcaaagtaagtgaccagtttgctttgggctggtgatccactatggagagaacctgaaagacacggttgagagcagaatcttctgcccaagaaaaggccctaaccatgctcaaatgatggaagtagaatataaaggcagtcctgttttaaaaatgtagcttttcccaaagaagctaaaggatttcctgaccttctgtatctgactaccagaactcagggagaagttcaataccataattataataaataaagcaarctaattctaactccttaaagctgataactatgcccttaactagttctaactgaaacaaaaagaaaaaaaattaagctggttattctctgtataattttgattttttagaagcttatatattcattttagttatttgttttatacaactatttaccacaacgcatgaacttaatacatattgataatacaggaaaccaaatcctataacaaaatgcaaattctgcctaactgcttaaacttactaaaaaagctaggttctagacatcaactttaggacaacataattttctctaagttattccagaagactatttgcataaaacttttggaaatctccactccaaagttcttccactgtaaactgcacttaatcttttcaattagcaacatgcttaaagaacacaatacaatatctgggatcaatggtctagacatttctacaaactgaaatcatatacctatataacaagagagcaactgattgtgactcaaacccatcttgcaactacactaataatttggcattaaaaggatattctaatagagccatattcacagaaaacagtgtcatttagtataatttcttaagaatctccatttaaaattctcagaaaaatttaaactacagacccagagaactgatagttacttttattaacctctcctctgattataatacgactgtattagaagaccttaagaacaaattcagtaaagtaaaatttcatttcaatgcctttttataacctttcagttcccagaataggaataataattagcactctcatttctagtgcttgaaaaacaatgaagtatgtgctttaaagaacgaagttatatcattttcacctgcatcgatgctccttctactcttgccacacaggcgacccgatccaagaaagtcactgccacaggcaccgccacaaagaagcctttacaaaaggccttratgtatcttttcacccacccttgtgactgtgccatacctaaaaatacaaagaaaacaactatgaaattagtctcaagaaaggtgaaaaacaaagacataaaaacagtacatgaaaagtaagagttaccgaagggcaatcttgtctcttaatatattacacactcattcctgtaaccattagaataaatctgacttacttaaagtcctaaagtgaaatacgtgaactcaggttaatgcttttccacaactcaagtccacttgctaacttcagtgggaaatttctccccacaaaacagtaagttagaaaaaaacaagcattccagaagtaaattcttttctgttgctattatgatgaagttactccttatacccctgatatctgttctcttctacagtaatamaagtttcagtggaacatgtggctgcccaactaaagactgttttccagcctcccttgcagctaattgtgaccatgtcactggatttgatcaacagcatgagtagaaaggatataattcttggttgcaccctgaaaaggaggatgccctcccttttcttccccattttataactgtaatactaacaatttggtggtaggagcaggggtrgccatctcaaactatgagataaaagcttcaagtaaagatgacaaagcaacaaaatggaacgatcctaggtccgcaacaccatggaggcaccatactgtcctgcattgcttacatttggactgttaaatcacagataaatcacttgcgctgtttgtggtggcagtgttggtgttgttgttgtcgttgttgtttttagacagggtctcactctgtcacccaagctggagtcttggcaagacttttttggataagacttcaaaagcacagtcaatcatagcaaaaacagacaatggagattacatcaagctaaaaagtttctgtgcagcaaacaatcaacgtaatgaagagacaacctacagaatggaagaaaatataaggaaactatacttctgacaagaggctaatatccaaaaacgcataaggaactccaacaattcaatagcaaaaagacaacccaattaaaaaatgcccaagagcttaacaataatttctcaaaagaagacatacaaatagccaacaggtatatgaaaagaatgcgcagtcatgagggaaatgcaaatcaaaaccacatggatatcattccaccccagttagaatggccattatcaaaaggcaacaagtgctggcaaaggtggagcaaaaggaacccttatatctgtttatgggaatgtaaattaatatggccattacagaaaagagtatggaggttcctcaaaaagttaaaaatagaactaccacatgattctgcaatcctattcttaggaatatatccaaaggaactgaaatcagtatattgaagagatatttgcactcttatgtttatcacagcactattcacaatagscaaggtatggaattaatccaagtgtccatcaatggatgaatgaactttaagatgtgagatayatatatatatattatttcaccataaaaaaagaatgaaatcctgccatctggtacaacatggaaaaacctggaggacattaagtaaaataacccaggcacagaaagacaatattgcacgaccactcatatatagaatctaaatagttaaactcataaaagtagagagtagaagggtagttaccagaaggtggggtagttagtggggaggagaggttggggagatgttgctcaaaggatatataattatatttaggaggaatacatttcaggacatctattgttcagtaaggtgagtacagttaatggtaagatattgtattcttgaaaaatgtaaacagagtggatgttatatgctcttaccacaaaaatgataaatatgttaggtaatgcatttattaattagctagatttaaccattccacaatgtacatgtacttcaaaacattatgttgtatacaataaaactcacaatgttatctgttcactcataaaataaataaaaataaaaatactcaaccactaattccctcccaaatctttaacatgtcacaggaaaaagatgaatgataatctaaattggctaattctgaattacctactgtaactgacatcaatgagggctatatgtatgcaaggtaagtaagaccagtactcttgttttttatacttttatcaacatatattgcacataacattcacccaaaccagtaatctttttatacctaatcaaaataatgtaactcagactaactttagaatataagcaatttaaaaacatgttttcattcaaactcatctaacaactataatcttaagttaaattgcttatgagttcacacatctggtactcaagaaacgtgtttggcccaaggtactgattgtttctgcgagcagtcttaaccactatattcctaaaagagtaaacctgcttgacatgtttcattcattcatacccagctttaatgtgagcccttgagtgaaactaatttctcttcaatgacgtcttttgcctagaatcaaaacacctttactaactcattttatatatctctacaaaagatttaatatacttttccaatggactattttacaaagatcccatttatcatgtactacctccattaatataaaagaataaccttgacatatttatcaaatcagtaccttcaagatgcaaaagatgcattttcctcaatattagatttcattagctcagtctctctgaaaacacttctaaccacaggtttagcaacacaaacatcagtcttataataaatttaaaaacggaatgacctccacatctattctttttattgtttccaaaatatatataaataaataaataaatccaaagatttcagattataaaatatctgaatccacaaataatttataaaatgctcccatgtacataggaaaaaaaatagttactacgtagaagagaaaggaaacggctcaacagtaaataatcaattcctctttgaccagtttgatagcttcaaagttattttaagtggtctacacttatgtttaagtcatatacaactcccagataataattccagggtagtgttccccaagcttgccttgactgacatgcttaaaaatgaagatccccactccgactcagacctccaaaatcaaacacttcaggtgattcccttaatagagcaagtctggaaaatactgatatttgggtgtttaaaggtcagctgtttactcactcctcaagtttattaccttctgaaaatgaaaacaggggaaaagttagcaaagaaatatcaccctgaatgtctcctcacatttagtttacctccttactagattaagaaaaagtatctgcagaacaaacattgcacagaaaatgaacaccactaccagatcctactttgtaacctctacgtggttccatcagaaaatgacttccagtggattttctctttgccccactaaggcagttcaatcatccatccactcatctacccagtcacttactacctggctcattcattctttcaaccagtatttactaacggtcttccacaagcactgtgttaggtaccagggaatcataaaacagtgaacaaggccagtcccagtccctgatcttatcaagtttttacagtcaactatggagtgataagggtcaatctgaaaatcacataaacatacataagagttgtaataagtgctataagagagatacacagaggtcaggaaaggtctttgaggaagaggctgaactgaaaaatgaggagaacttctctagataaagaactgtgggtaggcaagggtattccagagagcagccatgtcacatgccaaagtccctgggtcaggagtggccatgttgtgatggacaactgaagggaggctggtgcagataaagcacacaggaagtggaagagcacagtgggacatgaatgggaggaggcaatgtaaatcccagagcagttaagacctcacaggccccgtaaggatttgcagcaaatgagaagtaactgaaatgttctaaaattgaggtgaatgatcctatctgcattttgaaataatcatctatctgaaagcctggataggacaaaaatggatatagggaaaccacattattctagtggtccagggcaagagatgatagttggagtagcatgatagtggagatggattaaaatgggcagatttatgtatatattttggaagttaaactgacaggatctggaaatagatggacaatggtgggagaaggaaggagataagaaagtgtcaaggggccgtggtagcctgtcaaagcactgctattctgttgttctcttgaattacatgtcaaaatatttaatactaaaattatgctcataattccattcctcaaactttttttttggcaaacaagcagatgtgctccctgccctcaaggagttacaatataccaaggaagactgcccttcaacaattatttccaatggatgagcattaaaagggacgatggccctgaagcatgacagcatgaagcaaggctgtctattcatcagaaaatgatcaaggaaggcctgccccactccacccccacccccaaaaaatggcatttgaggcaagacctcggcatttcaggtaaaagcagtaacatatatgaaggcctaggggcaaaataaaatgtagctgtttaagaaactaaaataagttcagttkggatagagtatatacagaatttattacgtgaatttttaattcagtaagcatttatttgctatcaagcagcaatgctaagtacagaggatataaagatggctaagcatacagtatagtaccattcaaaaactctcactaaacaataccttacatttcaacatacatttatatgtgcacataaaagtatttaaaattgaatatttatattgttttaattgtttaataaccactcatatgttacttgtgtaattattaaagtataccaaaagagggaagaaagcagcatcaaaatgctagcagtggttaattctatatgctaggaatggagacgattactattttcttctttgaatttttgctggtttctaaaacagaaagatggtatctgccctaggaagtcactatgatatacagataatacggggtaacactagtgttaatttctatcccatcacaatgaacaaaccacactctcaccccaatctctgctgctctaagtagtacaaataacactgagcaagattctttcctgtttatgcagcaatcaatatatttaactgactataatgttgtttatgtagccagtgcaggctatctatatttctggaaacttctggaaagttctgtcaaatattcgctacttttattttaagaggcacagaatggaaacatgtcttctctttgctgttcatcatgccctgcatgcatggaccttcacaaaacagctgaggatacctgcaggacagaaacggaatgcttccaaatatgatgccacagctatcttagttataaggtagtatgcatgattaaaatgtaaattaagggggaaayattaataaaagttgcattaaattcacatttcctgaattgtgagcctcctcttcttttccagtaatgctctcctacattacttctactccatgtagtcactggtccccaaaaaggagcatggtaatgagactcaggagacctgaggtagatatctgtctctgtctataaccagttccatgactttgaacaagtcacttctggcctgtttcctcatgtgtgacaagaaggggcttatttgggaggccaagcaagagggtcacttcaggtcaggagttcgaggccagcctgagcaacacagcaagacttccatctctaaaaatttaaaaattagcaaggcatggtagcatacacctgtagtcctatctacttgggaggctgaggtggaaggactgcttgagctaaggagtttgagactgcagtgagctatgactgtgccaccacactacagcctaggtgaccaaacaagaccctgtctccaaaaagggggggggggtagatttaatatctaaggttctttctaagccagaattctttatttctataactttttattgtcttttaactgtttcttaagaactttggcagatactaaaacaaacactgagatcactattgactaagaaaaagtgagttgcctttatggtttgagacttttttaagtattgaaaataaaagagaattaactttttttaaacaactggttaaaagacccaacagtgagggagctgaaaccagtgccaatgatgtaaaagaacattttaaatatagataaagacctgaacaccgttgctctttcacttctcatttccacaacctgactgctgaccagagcattgctaccatcgcctgcacaacaaagtcagggcaagtgtttttctgagagattataaaggagcatgtgggagatgtctcaatctgatatgtgctgatcctgctccaagccaaggaagcaagagcaataaaagctaccctggaaacaaggtacaagtggttgctattttcagaggctcaaaagaaaacgctcaattcagtcctgttttatctgaattgtgaggggcacctatatttcataataataaaacactgttaaaagcttctatcatgtaaatactaaagaagccattcatacatgaagaaatgaacacaacatttctatgttgtcatatccaataattttcttaaagttttatggcattcacatattggcaaagttaatgcacctccttgtctatgtaaattgccaaagaatcattcagatgatccggtcttttgttcacaccttaaatgtttaaaaccaccacagtaataagtacctagccccgacttcctctgggaaaatttcatctaagcaataacaatcaggtactaaaatcacccccagcaaaaagggaataatttttatcagttacctcattcttcttgtaactatggaagtcactgaggttcaaaacactgctcctgagaaaattattgcttaaaattgtaagtacacccagttcattgttgaagtgcttaaactgagaatattttttaaataagctttcagaatcaagtgaaaccatatttgccacctggcatacagcacttacaagtgagagtttcttggtgatgctgacctcaaccacataacaacccacactgtaaatttctctccttcccgtaacaacttgtggcttgatcatgcattaattcatctaaaattgttcttaagcctgcttatattttagcttgtacaaagtcaccaatcactcatccatggcaaccaggtggataaatccaccacaagtcatcctaattataaaaactatttaaaagttgtgtgggaggtttgaaggtaagaggaaaataataagttataaagcagtatcttatgtaaaatgtaacctttcaatcatcataagcctacacaaaatcaagattttatttataaagaggaaaccatcaaactatgaatatcagagaacacaagagtagggatccaagcaaatctgacacacaattcctgaatcagtcagtatatgtgtacctaccatgcaccatggaattgtgctaagagataaatatgtgttatagaacaaggtcagcatggtcctttctccacgtagagtttgcattttcattctttcaacattaagtgcctactttgtgctagacactatgttaagacaccagattgaccaagccatacttcctccccagagggacctgtgacaaggtcacaagaaacaagkatatgaccataaataatccagctatcatcctccacggatctttctagcagcccctggtaccaataacctggctcggcaaacagagcctaagcatgtgaaaaatcaggagacatttggatacatgtggtctaatacaaggataaaaaagaaaaactgatgaattacaacaattttggttccactggaagcagatcctggcaagtaatctatagaaagcaatttaaaaaattttttcaggactatcttgctcctttcacattataagtaaacaatattttataaacagacacttagtactctttagaacatgaataccagtatcaaattctttatctttagtcttgtctgacctagtagttctcacttgaaaattctcaggaaagaccaaaatggcacatacacaaaaaaagaaataagaaagaaagaggaaaaccagccaaaaataataaaggaggagaaatgtaattatgtaaggcataaagttagtcattttttggcaaagatacccaataaaaaagtcaacactgatacaatgatgaagctaagccctataaaattgcttctttcatggagataattgtgactttctgttggtaaactgataagcatctggatactaasagaagagaggttaaaactgatgtattcaatcttaagtcagcaatatgtaaaaacaaatgaatttgaaggtcatgctctagtacaactgatgtagagagaaaatacaaccaggaaacaactaggatacagaaattcataaaggcttcctgatttttggtaaggactccttcaacttgcaaacatcatgcatttatgcacacccttccctctgattcagtggaaaagcaggccccatcctatccaaggtgctcttcagaagcagcatcagcaaagagggaaagtcagtgaaaacctggtgggctttgaatccaagacctcagttcaaatcgtgattcaacagtgtggaaattactttatctcagtaagcaaaatttttcatctgtgaaaccttgcagggtttccagaggttcaaaatgttcatatgtgtttgttttcttttgtttacataagcatttgtgtaaagaaaatgactagatcatcaaataaaggatatttcttcagataaagcactagctatgtctaaggaagaggactagtaataacaaatcaaaaaaggataacagaattaaggatgtccattacagacaataaaccaataaagcccatcttctaggtgataagacacctaatacataatcattttgttctgctttgaacctcatgctgttctaagatttgaccagttaggggcaatcatatgtactgatattaaccagttaacaagaatgtattcagcactgtcttaggtgtcttgagatttttttaaaagcaaaataaaaggaaatataagacttagtgccagaattggaccacagggatagattatataatattcattgaggaaagaataaaaaggaagaaaactggaattacaggaaaaaaattcatgatgagaaaggctaaaaagaaaaaaaaaggaattagaatgtaggtggtgggtttaaaaatgttcattataaaattcttagaatgtttctgtatgtttaaaatttttcctcaaaactttggaaataaaagaataaattacatctgttaagtcactcagataaaagaaaaatataattagaatgaagatgcatacagcccatctgagatagcaagaatgctggccagatcagcgaacaggacctatattaagacaagtgagacataagactgaatattaattttttttttttttttgaggcagagtcttgctctgtcacccaggctggagtgcagtggtgtcagctcactgcaagctccgcctcccgggttcacgccatcctcctgtctcagcctccagagtagctgggactacaggcgcccaccaccacgcccggctaattttgttttggtatttttagtagaaacagggtttcaccatgttagccaggatggtctcaatttcctgaccttgtgatccgcccgcctcggcctcccaaagtgctgggattacaggcatgagccactgcgtccggcctgaatacgaatttttcttgttttagttgttttctttttttttttttcctcatcaatatggacatcttcatggctccagtatttttggaaaccatataaagcaaaatcctttaacaataatctaggactctctaagaactggctcaggccatcctaatcctataaattatccttatcctgtaactccaaatagacaccatttaacagcatttacaaccaaggcctaatctcaaatttcagttattaaaatgaaataaattctgcaaaaagtttaccataaaaattaataagacagtgaatagctttttacaggagaaaaatcctattaaatgataaccattagcacggagaagcttggtaagctttaaaccctaataaccacaaaatttggatttcaacactgtactttatttttttccaatttaatagaaaagcataactgctatcattaagtagaagctaaaggcaacgtgaattttaagctaacaatgtgaggacttaaatatgtatataaatgaaacagaccagctacttatccataacccaagcaaagcaattagaggatacttttcaccataagtccattttttcttgaagtaataatacagtgggttagtaaaaggatatattaccagcatcaggaatacttactgaatagctaagaagaaaatactgcattatttggcatttgggctgtgttcaaaattggctttaaaaaaattaagaaggcctataaatggaaaaagcactctttttagaaaaaaaaaatctcaagaacctttcaaaaatcaaaacttagaagaagtgagataggggaaataagaaaaaggtagtaacactcagaacctaaaaaaagaagggtacaaaatattagaaagtgggcattaggcaataacatgagtaatggaaaagtatcactagaaaccatgtgacagccagtttccaaagcacggtcatccaagtaccaagctttgctgttccttatctactttgctacctcacattttttcctactatctgacactgcttcatattcacttctcttacactgcagccctacttcggtcttattttagaatggtacaagggtcttattagggctcaacaataagcggaattgaaaaacttttttaaagaacatggtttctgggtctcatgaaaatcctatcctgatccctactcttcatgcctcaaatatattgctatctatactagaatgcaaatgcctttactagaatgccatatcaactcaagtcatacttacaacatggcttttcctttgatcagggttgggagtaaggagtaggaaggcttctcaaaagaaycaggccactagaccccaagggacaaaaatggaaagagaaagtcacaaaaaagtaggactgaaaaatacaatttaaccagcaaacttatagctagcccagggactattactactctttacaaaatgataaatacaaaaaaattagaaacacaggctcccccatcaggaaagcacattaaggctccaattagtctgtcaaaaataaaatctattcagactatggcttgaagatttggaaaggtgcccacagcccatgtatggcagctgcaagtccatggggagttcaaacagcaacagtgcagagtcagtactgaagatgcaagccagaggaaaagatttatgcaatttaaggtgaaagcaacagaaataaactcccttggaatgagtgcttatggtccttttagcttataagtgcaagtgtacccacaaacatgcatgcacacttgctgaaatggcaacaaaggccaagttagcagcatatgttaaaaaagaaaaagtaaaaataaatatataaataaatagaacagccaagaggccagagtataaagcagctcatcctgagtggcctggagataaaagcagatggagcacagcattacccagactcaagtgtctgttgcacaaaaagtccaggtattataacgagcctgtggtattacagcaaatggaactgcgatctcatttagattattctccactcttatatgccttgttttgatttctgcatacttgcctataaattggaagacactgttttaagatacctgtgaaatttcatcaactgtggctagagttgaaatcttaacttcaaccttaagagaaacactgaatcagaactacaaagctgacccgctcctaaatttctgatgatccatggaaactgtgtgagataataaatgtgttaagccactgatttgggtggttatttgttttgcagaaatgactaatacaatacaaaatgcacaaaaagacccaagggcgcaaagaaacttggtatttgataaagtcgacattcatattgggaagagaagttgaattaacaagttatgttgaaacaattagctacaatttggaaggagaataaaatcaaagctagatatttattaaattcattataagaaaataaattccagataagccaaacattatatgtaataaatagaaatataaaaataacaagagaaaataaaggcaacagtcttttaagggtagaaagaggtctttctgaacattttacaaaatccagaaaacatgaaagataaatactgatagatttcactacataaaaatcaaaacataccataaataatgttaaaagacaatcagcaggacataaaaaattataatatcagtatctctaaaattacacaattcttataaagtataagaaaaaagacaataattttgasagaaaggtatttcactgaaacaaaatatggacagtatataaagacataaaaagatgtacaaacacactaataataaaatcaatataaataaaaacaaagtactactttagtctatcaaactgacaaatttaatatggtaatatgtaccaaaatgttacatgaatataccttctgatgcagaaacaccactccaggaatttattttatggatgcaaagatatgatcaacgatattcaacataccatttttattgcagtgaaaaaatgaaaacaaccaaatgttcacaaatatgtaaataaattatgacatgcatacagtagagtaatctgcaatcattaaaaagaacaatatatcgttatattgcttgagattcycctccaaaaaagttggaaaattgcatttttaatatgaacccatttatgtgaaattttatacacacacagcatcatcctcatcgtcatccttatcatcatcatcatagaaagaggtcaaataataaagaatatgaaccaaaatgatgacagtatttatttgcaatgaaaggaatttcactttatgctttatatttttccatattacttaaatcttcagtaataggtatttagtatctttatatactaaaacaaaattaatattacagtcttttctgctacaatagctatttcttaatgtaaattagctcatatataggaaaatgacgtcagtcttatgtgaaagctatgctggttcatacacaattttccccagtacatgaaggttttgattcaaccaagagcaagtcttctcccaattaaagtgaaagtctcatttggtggcttcaagactttccactgttaaaggaggctgagcataccaacgaagaaatgcaaagatattttcccctgtgtttaaaatagaataaaatcaacagatcaatatcctagagcagattttcaactttgatgaaattggtctgtattagaagtagatgactttaaggacctacaacaaaggaagaaaaccagggtttcaagctaagactgatgtgatgctgggtgcaaatgcaaggagggagttaatagtgctcgtttttatgacaacttctattttctcagctctgtttacaaaatgtcactggtttcaaatgatctgttcctagccctattttctttataagccctaaaattttatggtttaattttgcagaattaaagatttttcaggaatgcatgtatgtcattaataggagaaatgcctctactattctgagtaaaatgcagtaaggtagagaaatgttccatatcaaaaagaaacaaaaaacaaaaaaaggaagcaaaaaggagaaatgaaggaagggagggaaggaaagaaagagggggaaaaagaggaagaggaaagaaaaaaactgcacacttcactttgttttagtgagagtgtctaacgaaagatattaaatgcagggcaaaacaatctcattaatattcttgatttataccacacattttgattctatatgagatatatctaaagaaatggtctttgccccatcggacacttaaaatctaaacaagggagtgaattaaacagtcatcaactatggtggggcaggaaaagggactaatccaattaactttaggacacagttatttaattatacccaacccaagggtatagagtcaaatactataggcggtatttgggctgggaagttggggggtggggaatgcaaacagtgagagaaacaattgtgaaactacttaagatacattgtaggactcagcaaatgagttgggagaacagtggtgactgtgggaaaagggagataaaaatacacagtgggaatcagggaagaatgctgtggggccctggaagcaaaaccatatagaagtagcaatgagtatatgtagtactcaattcttagggtctaataccattccctactccaaagaatcagcaatcttcagagtaaaggttgattctggggctgtggtggggaaggtttaagatgagcctgaaacattttctttggccactaagaagtgcttagaaaaaagatggaagtacatcaaaaggagacgggagcttgcctggtgatcccactggctaaatatgaaaaaaatttgattacttattaaataaagtcagtaatgagtttaaactactggaaaaacagctttgaatgtgctaattttctgaatctgagcaatactttaaaatatgggttttagcttcaaaaggtaaatcaggtaatttcattttatttaagtaataccatgaaaataatgttacaaactactaagttaaatacaatatgaaatattggtggtgggttgttttttgttgttttttggggtttttttgaaacaaggtctccctctgttgcccacgctggagtgcagtggcatgatcacggctcactgcagcctcaattcccaggctcaagtgatcctcccacttctgcctcccaatagctaggaccacagatgcacaccaccaggcctggctaattttttatattttttgtagagatggagtttcaccatgttgcccaggctggtcacaaactcctgaattcaagtggtccaccagcctcagcctccggaagtgctgggattacaggtgtgagctactgtgctccgcctaaaatattgttttaaaataagtcccctttatgatcattctcagaaatttgttagaaaagaagttcccttgcacatataaaaaatttttttcaatttataaattatccttctacactaatttccaaagaataatcattgagatgagttaaagcttttcactattctttgaatattatatcagcatatccaactgttaattgaatttgagatccactagtaaagcaaaaagcttgtgactttgaagactatttaaaatgtacaatgttttattaattatcattagtagtactattatacaatggttgtacccttgtaagtttgttaagaaacagctgacattgaaattgtctgcatctaaaggacatgtcaggaaaagcagagaaatcttaccaaaaaaaaaaattgaatcaacatctcttcttttggtatttacccctttcacatcaataaacatttactgaatatctgctaagtgccaggcatcatatcagtttctataccgaaagagtaaagacgtttctgtatagtatctatatagatattgaacattaagcattgttctttggaattattccagccttgagataaggctaaaagggccataaaaataaaatgaagaaagatggattttataaaggatagaggcaattggggatgttatggaaagacaaactacacagcattttatactctctggttcttctactttcagagaatgactctatcatccaaacagctgcccaaaggtcaacatggtagtgagccaaagtgagcattcatgaaaaaaatagaaatcatcctaactttctcttactttaaatcgttcaataactcctcattttctataggataatatcaagctgcttagatttagcatatamggctaattatgattagattcctagtctcatcacttccacttttttttttttttttttttttttttgagacagggtctcactctgtcacccaggctggagtgccgtggtgcgacctcagctcactgcaacctctgcctcccaggcacaagcaatcctcccacttcagcctcccaagtagcgggaaccacaggtatgtgccaccacacctggctaatttttgtattttttgtagagatggagtttcatcatgtttcccaggctaatctcaaactcctgagctcaagtgatctacccaccttcccaaagtgctgggattacaggtaccagccaccgtgctgggccagttcctctctttcacagcacatcatgcttcaaccaaacccacctccatacaatttctagaatatgccacacttttacttgtctctgggcccttatacatctctcccttctgtctacatcactcttcccacctttctttgttttggccagctttacccatccttcaggttagcttagatgtcactatcaggaagtccactccgactctccaaatctgacttagatttccttcctatgtgttcccataaaactctatgctccccctagcacagcatttatcacacctgattttctcatccttacccctaatcagttgtgagttctgcgcgagcagaaacacttgttcactactatacttaagtgctttgcacttaagtgctcagtgttcaatacagtttcattgaagaaattaattaaccacttagctgtccatataaactacatcatactcagaatgtgatataagttctggaggccttgattgaacagcactgcacaaccacatgccataaattttatgtgtgtgtgtgttagtttgtgtgtgtggtgtatgtacacacaaatgactgtctccatctcttacctgatagttttacttcacagctgaagatatttatgaagaaagtggtttttaaaagaaattatacttatgctgtaagtataaatatacacagaaagaaatatgtgggctggacacagtggttcatgcctgtaatcccagcactttggaggccaaggcaggaggatcacttgagctcaggagtttgaaaccaacctgagcagcataggaagaccctgtctctaaaaaaaaaaaaaaaaaaaaaattaacatagccagtcatggtggcacatgcctgtgctcccagctactcaggaggctgaggtgggaggatcacttgagccaaggagatcgagactgcagtgagctctgatcacaccactgcactccagcctgggtgacagagcaatgagaccctggctcatttaaaaaaaaaaaaaaaaaaaaaaggctgggcacagtggctcacggctgtaatcccagaattttgggaggctgaggtgggcagatcacaaggtcaggatgttcaagaccagcctggccaacatggtgaaaccccgtctctactaaaaaaacaaaaattagccaggtgtggtggcgcatgcctgtagtcccagctactcgggaggctaaagcaggagaattgcttgaacctgagagacggaggttgcagtgagcagatcatgccactgcactccagccttggcgacagaacaagactccatctcacaaaaagaaaagaaaaggaaggaaggaaggaaggaaggaaggaaggaaggaaggaaggaaggaaggaaggaaggagggagaaagaaagaaagaaagaaagaaagaaagaaagaaagaaagaaagaaagaaagaaagaaagaaagaaagaaagagaacatacgtcgattactacatatatatctgtatattgaacttcaggaagttgacttttctgtatttttcttcaataaatcataacacaacactcttgtccaaaagcagtaaagatggataagaaggatcaagtaactttcataatccacccaactataaggcattaagaatttttttcccaattaacagctgatttttaggaagtgtttagttagattttytttcaaagcaattatttttcagtctgtgcttcatggtctcctaatgattccctggagtctcaagggccagggggagcaggtgctaagtgaacagagttctgaactgcctcaatcagagccactctgctttttatctggttttttttttttcaataatggaattccaaccaagattttctttgaagaagggttcactacattaaaataagaataaaagaaaaaaagaaaaaggttaaaaaacactgccttaaagaatcagcagtggattgaggtttgcactatataattcaagctctaatgtatttcatatttcttggttagactaaattcaactgtcagctttataggcctttctttgtgctaaaatgagaaataccatttgaatacaaaaatatccaggtagagggaaaacaaaatgggtttttgataagtatatttattctctgatgcagctatttctaaatttacttattatttttaatggctttatttatgtaccaatcttcaagttaatgattcataacagaacaccaaaataatctaattgaacaacagaagcccactgtaaatgccagctgctgctatgtttcatatactgtaaacaaatacccacctcattttaatagtttcttagtagaaagattaccttaaaggaaaagatccaccaaactcatatttaaataataattttagctattttcgcaatctagaaacaacaggggctccgggtaactgaaactgggggtgctccatcataaaacatccagaagaccagtggggtgaatttgatctgctggtgaacacaatgaagactaataagcaaaaatgggcttcttccaacagaaacctcctgccaacctgtgcacaacattgtgcaattgcagaacggcacttsactggaagtcagggaaacacttgcaatcaagtccaggctctgtaacaagttaagtgaatccaaaacctttacagctgaacacataaaattattcaaaagmtctaacgaggtgagaagcaaccaaacttgattttcayctctgggaaaccctatattagcactgtaacccacaaggccctcttccacttccaaactcctctggcattcactagccacaccttcatttggcacccaagagtgttagttaccgttttataggtaactccccaactaagttgtaagcccctaaagggtatacataggtcatgtctcactcttttctatacatcctaaaattcttagaattttgctaagcatttgcagatgctaaataaatgtatcttgactgtttgtttaattgtagatatggtttatattaccacccgtttacaatgttgatagtttcatatggttgtgtcagacgacattccactcctttaaatgccagtcaggagagtaacggagaaaataagcggccagatcaggctgtattgacagccatgcaactaatctgatactacctctccatgcatgcgtccctcccaaagaccaagtgcccactctgttctagggctaagtgttttctgttcctgctatgctttgtaccaagtcagaaataagatttggattcaagtcttagctatgccaatgagtaagcaatttgaatagatgaccttagctccaattatctatgattctatgattctaacttcaggcctttaccttccaatatcagaatggcccctccctcacagtactaaaattacttatcttccatgatatgtcccattatcatcatcaatacacccatgttcaaaggccatttctgacttctgctacaaggtcaacatactcatgaaattatttacacttctaaagataacactgttaaatttcttgtctgatctttacgtcatacctgcgttcatttaataaacacaagtgggtagttgggtaatatgggaaaagacactcatttagggaagtttctaacatattcctgctttcagcagcaaagataagttatggctccatttgcaaataagcaccaataatagtaaataaaactaaattatttttatactggtcactaggaaggttgttttcatcttaaacggcagcttagtagccttgagaataatctgatctctcccattttataagaaacttatttttattgtctcatcaacatcaaatgatattagggagtttcacaatgactgtgacaataaatggcttagaaagaaaattcagtaacaattttgataggttttaaggaatatatgagctagataaaaatatatgagccatatagagatttgatgcaatttaaattaatatctaccagttttgaaaaataaagtttctcagaacctaatgtagctttcttctgcaaaaaagacgaggcatatcacctaaaaagacctgtccctaaccaactgttatccaagtaattaaaaagaaaagtgaaaatttcacctcttcatacatgttaagcaaaaccagccataataaaatccctgatgaaaggtgagttttaaaaataaaagtgagacgtaggtaacagaatcctccaagaaatacttaaaaggttagttttcctcagccaaaatcatatcaacattttcgtatattttggatattaacctcagtacaaatattagattatcaaacataaaatataaaaatatttggctaatggtatagtaaggttttgtttcatttttaatagagtgattagccattcacaaaaatcagtcaatattactcctccataaattatgacaaaaaatatacaaactctgaatgaagcattaattgggaaaagaaaaaagctaaatatttttattgtgaaactaataaaataaaaacctcagtctagtagagaatatacactttgtgttgattaaaattttatatcactatgttaaacacagtaatactgaaaattgttattttaattacctcatttaatctctacattaaccttatttttatccccattttaaaagatataaaccgatgctcagagtgcttaaggaatcttcccaaggtcaaagaaacagtaagtagcagagctgaatccagattatttgaccctgtaaactaggtatttaagcactatgctacactgcctccagttattcataactcccaataaatattcaacactcccaataaaacacagggcacgatgagttattgatttcataactgctactgcagcattcagatactacttatttggaaaagtgttctgaatacacaattaattcaatccactatgtaaaaggtaaatgttcaagtctcattcaaatggagaaggggtagaaaaggaagaaaagtacaaagtctatatggaacatcaattaataaaaaatattatcagggttgtctttaaacttcacaattactgaaggtccttattatcttgctgtcatttcagcactctcaattgcctcttagaatttgaaatttcactgttgaaacaaaagaaacataaaatatatgtgcattctaaaaaattctgcccttttgcaatttatcttctacatttattacctggatcttctaacactcgactagaaactaaagcaatccaactgtatatacaaaatgtaaaactggaaatgccagaaaatcaacatgacctttcaaatataacattttccacaatcatttacttaatactagaaaaacattttacagtatttaaagcataatctttatgtgtaatactttcggcaaatataaaagcaaatacagaataaagtcaaccacatttttaaaccaaaactgcaattaattttaaactactactttttctccagtagttcattatctatctattaaaacattcataaccatattagtgtgctctccgtttcaaatacaaagctgatgttaaccactgtactagtcacctcctgtacctggtagggactgctagtataacaaacccctcccctgacaccaatttccctatattagtttgcttgagaacaaaaatatgtattgggcaaagaaatgagataagccttctctgtaagccagcaagaccactcttgattaatccccaacgtactggcctcaacagcatggcttctaaccaaccagaatcctcagycaaaaatactttaaacaaagataaaaattagctagaagatcatgttaccctaaaattaaattttatttgagagcaaatgtatagcctttatattttctgatccaatcacatctttgttaaaagcaaaagatatgtaaatcaacactaataggatgttagattttccaagagagaatcacacttcagataaactactactcaaaatcttttttattccataatcaaatagcaatccttaagaatatacctttcattcccttttgactactttaagtatttccaaaagaagctgaacagaaaatacttttcttcagacttttttccgcacatctcctagcaggagagaaaaattagcaaaacaaatgaactcagaatcattaaaaggtgtggacagtgtccatcttatagctttaatacctaagaattaggaagaaaaagagatcaaggaaataaagcgaccaacataatacctggctgaaggacaaattctatacttaaaattaagtatggctctaaaaaaggatgagtttatgtcctttgtagggacatggatgaagctggaaatccatcattctgagcaaactatcccaaggacagaaaccaaacaccacatgttctcactcataggtgtgaactgaacaatgagaacacttggacacaggatggggaacatcacacaccggggcctgtcgtggggtggggggatggggtgggatagcattaggagatatacctaatgtaaatgacgagttaatgggtgcagcacaccaacatggcacatgtatacacatgtaacaaacctgcacattgtgtacatgtaccctagaacttaaagtataataaaaaaaattaagtatggctcctaccgactctatgaattcagttcatatttctttaatgcaaagagagaaagagcaaagttactgaatgaagagataaaagtgtaaaacatcaacaaagcaactaaattagatacctcacctatcacagagaaaatcaacaaggcccaatgaatttatatgtacacatttacctttggaataatacgtcatctgctttttgtattctagacatgttctattccattgactgggaaaaatcgaaaaggtggcctttgtagcagaggacaaacagaactcaggcttagtgtaacagagcagcaaaataaggtgagagaaaagcagctgagaaggggaggtttacattcaacatgtataaaaataatgtatattggctttttttttttcatgagggaaggaaggtaactggctaccctaagaatgaagcagaatcagcatggcaagaaacaaaacaggcagaaaattaaaggatccctgagaatggtttataccccaaacaaaacaaaagtgagacaaagtagaaaaaagaccaaaacccaaactaagacaaaaaccccaatcctctctcttacattgagagaagcagaataagacaacatcaagaacaaaatatctgcatccagaagtcagactcacacacacacatactctcagagcagcaggagaacaaaaggacaacatattttacaatattaagataaaactagtacaattatatttttaaatattaattttttttaaaaaagagaaagaacaggttggtcagctctgcccatagatgcttccaaaaaactccatagcagtcatcctaatggatgtgagacacaatttcactaggcctttgatatgcatttccctaatgattaatgatgctgagcatcttttcatgcccttattggccatttgtatattttctttgcagaaatgtcaattcaaaccatttgcccatgttttaatcttgttgttttttcttgtwgagatgttcggagttttttgagacagaatcttgctctgtcacccagctggagtgcagcggcgcaatctcagctcaccgcaacctctgcctcccaggttcaagcaattctcctgcctcagyctcctgagtagctgggattacaggccaccattcccagctaactttttgtatttttagtagagacggggtttcaccatgttggccaggctagtcttgaactcctgaactcaggtgatccacctgccctagcctctcaaattatatactgtggatagtaaccccttatcagatacatgaactgcaggattctttttaaattcatttctctattccctaatttctcagagttggctatatgtaatgcagaagtacattttgagttgaatatatttcttctttgtttttattttttacctaatacaaaatttacaatactcaaaagaggaatacaatggaaaataacctccatccctgttcttcagctacsaagttccaatccccagagacatttttcatcttcttataattccctccagaaatattctatgcctatataagaaaatacatttcttaagtctcctccaaaataatctattcattgttctgcattttcctttttgatttactacatcctgaagattattacatttcagtatatataaactgccttatttttaacaacataaatatttcattatatatactataatttatttatccagtcccctaaggatgggcatttgtttccagtcattgccaagagtatccttaaatatatgttatttcacacaattacaggatctataggatacaatctagtagaaaacttaaatgctatatatatttcaaattttccaaactgacctcaatgaaaattgcacaaatccatactcccattagcaatgatcacacttgcctagttccctataccctcaatgacacattgtgttttcaaaatttgtttctttgccaattaggttttaaaaaaaggcatctcattagagttttaattttgcatttctcttattatgaaatattaatactctttgtatctttgtccatttttctatccaattgttggtcttcttcccattgagttgttcgtgctctttatatatttatgaaatcagctgtcttcctatgatatgaattgcaaacattttttcctagtttttctttgctttttgatatactttgttttcttaattctcaaatttaggaacaaaagtacttccactatgtctttrttcaaactatattccttattttgaatgttcttcccttccttcaaaggtcaattcaagttgatgtctctgctctctccctaatcactcaagatcaccttgattcaaaaattatttagtgagagcctactgcattatatttacaaataagtaaatccagtgaattttgtgatatagtagcacacagcaaggaaaatttatagaggccactaaacatttaaattgtatctgaaaaaatgagaagatatgatccaaattttaaaaatgaaacaaaggcccaggtaacgagaacttattgtctataaattagtctcattggggtacagaatgctaatgttgtagtgaaaaagagaaaaagctgaagaggcaagcagagccaggtaggataggtcttttaggccaatttaagtaagtttttcttaatctaagggcaactagaagccacagaaccattttaagcagcagaatgctggtcagagaagaattttacaaagaccactgactgcaatcttgagtttaaccagcacttcagtgaacagagttgaaactgattcaaatatcaaatatactcttatttattcaataagtgaattttaaaccactatggaatagaatgctacagaaaggtgaaataaggtactgtgctgctctacttccttaactgagggcttggaacaatcactgttgcaagtcaatttaaacaaccagacaatcagaccatgttaaagatgagacctctaataataaaaaatcatagttgattctcactttatcataaaatccaaaacggacaagtatgggcccaaattcatgcagttcactcaacaactgtactcttacttctccattgtaggctaaacaaactgtcataccccccccccctttttatcctgcttttttgcttgtttttttttaattttttatttatttaggttgggggagacagggccttgttctgtcacccaggctggagtacagtggtgtgattatggctcactgcagtctcaaactcctgggctcaagagattcccctgtctcagcctcctgagtagctgggactacccatgggcaccaccacaccagtctaatttttttttttttttgagacagggtctcactgtgttgcccaggctggtgtacagtggcatgatcacggcttactgcaacctctgcctcccagtctcaaacactcctcccacctcagcctcccaaggagctgggaccagaggcacatgccaccacgtccagctaattttttgtatttttgggagacacagggtttcaccatgttgttcacactggtctcaaactcccagactcaagtgatcctcctgcctcagcctcacaaagtgctgggattacaggtgtgagccactgcacctggcccatcctgctttcaacagatgacattaaatgtccagaaagaattcatgagatgttatgaccattgaatttccccatgtttagcctgggtagtgagaaaccagtttcagggagagaatattatctatcagggagagaatattatctatcttgtcacccaattcaatcctctaaaatgaccttctatgtgcttgctacaaaaaaaaaagttcttccaaacaaatacattcaaaaaataaagtttgtttgactgcatgcttctctagaatgcttttaaaattttcttctccccattctcaatatcataaatcaggtaacacctaacaggaattgtctgtactatttcttatttgctggtgacaattcctttttgattccccatgtctactttaggggttagtggtttaacagtcattcttacatcttttgtcataggatattccaccgttctgtctttagatatatgatacactttgaagttaacagaagaaagtaaattagtataaatacaaaaagttgatattacaatataataagcatgtcaatggtactaacaggagatgacaattacacctttatctcgaagtaatcaccatcaaccattctcaaactcagaagtgtatagttttttttataattttaattcattatcatgtcacttaccatttttctctaagtattttaaactatagggacattttgattgaaactagaattgtattcaatacaacacctccctcaggaatttaactttacaagcctatttctattctcttcccaagaatctttccatctaattctaccttgccctcgtggcttaacccatacagagactggtcataagtgctttagaatctagcattttcttcctacaaacaggaaataatgtgtctctgacactatccaaaaatgtggcaacataatttatgcttttggaaggaagactaacatctcaagctgacaactaggtaataaatatgattaagacccaagcacacaatgagaatatcccaaagggtatacctttcagaagaagacaaggcttaatcagtgagacattttcagcaaaaaatacagtcatttttttctcagatgctcctaaataaccatctttttggcagtattgacttgttagccccaaatcattatttcccttctttactattaatcttcaaaacaaaaaaatttaagtctatgatagtaaccaagtctgactcattaaccgaacaattccccactattctctgagtttaaattcacataggattcttacaaacagcttatgaagtcctcaaaaataacctatgaagtatgtgttatctctgctttcccagaaggaaaatgaagttcacagacaaaaagtgacttgttcatgttcacataggtaataacagagctagcacctgaataaagatcttacatatccttttcactatatatcaccactttaacatctggatatttatatttaaagcctattttttaacttttaatatagaagttttaactgaatgtttagagtattagcataatgtagtcatatacatcagacaggtctcaaaaaatcttctaatatgttgtcataatccacatactcagactacaggatgtctcttaaacatgagaaatagtaagattctggccacgtgtggtggctcacacctgtaatcccagcactttgggaggccaaggcaggtggatcatctgaggtcaggagttcaagaccagcctggccaatatagtgagacctccatctctactaaaaatacaaagattagccagacatggtaacacatgcctgtaatcccagctacttgggaggctgaggcacgaaaatcacttgaacttgggaggcagaagttgcrgtgagccgagatcacgtcatagcactccagcctggatgacagagcgagactccgtgtcaaaaaaaaaaaaaaaaacatagtgagactcataaaaagcacaagctaattcatttataaactgattcaaactgccctcacataataacagtgctaaatagttattaatatttaacaaaactaaataataattattcagtatttaaatctgacactaaaaaaaactcttattcaagcaactattaaacaaataagctcctgggaaaataccaagatccttagtaaataatctgcaataccaataaaactaaaaataaaggccaaaaaggctacatactgtatgattctaactctatgacattatggaaaaggcaaaaacattggagacagtgaaaagatcagaagttaccaggggttaggagaagggagggatgaataagcacaacccaagatttttaggcagtgaaaatactctgtatactataagcatacatacatggcattacacatttgtccaaacccacaaaatgcactacaccaagaatgaaccctaatgtaaacaatgaactttgggggataatgatgtgtccatgtagtttcatcaattgtagcaaacgtaccattctggtgggggatgttgatcatgcaggagaggctatgcatgtgtgagggcagggagtaaatgggatatctctgtaccttccattcaattttactgtgaaccaaaagaccctaaaaaaaagtctattttaaataaggcaaaatatctgcggcaatcttaatcttctcctatcaattattacttcacaggtcctctgttaactatttagtagaaagcatccttggctgtcaatgctaaccttctgcacagctcttatttacacacacattgctcctcataacatctgctctgcccactgtagcctgcttatcctctaatggtcatcagtatactgagtccaaagacagggaaggagtcaggtacaaaygagatggagaagacaggtagtggggctaaggaagcaaagaactgctaaagagggaagtcagcagataaatctgcaggagaaaatctgcagcaacaaggagaaaagaatcctgagttgatacaaatttgtttattggtttacataatgggaamatcatatgaaatgaaattatcctaaaatacaaaacatgatgacattacaaacatttcccttctttaaaaaaaagtctttgctgtatacaattccgtaactagaacttgataatctgtttgcaaygtgtcccccagcgacaagcaagatgatttttcaaaagttgactgtaaatgctacatttttcaaaggaaagatatataaaagtgtgtgtgacaaagacctatgtctcagaataacttggaaaaaagtacaaatattaaatttttatgatttattgcctgaaagaaagttgtacacttttatattctgggtattcttaatctaagaagtcaagaacatactatgtattaccaaactgggcaagagttcaatgagattctgaaagttatacctaacgtactatgtattaccaaaaacatacaatatgtttagtaacaaatagtatgttaggtatgttaggtatgactgttagaggktgtgtgtgtgtgtgtgtgtgtgtgtgtgtgtgtgtggtcacttgcttgctttggtcatcggtgaggaagccaggctaagcaactaacaaagagtccaaatatctgaktcatttatgagaggctaagggctccagtggcaaatcagggacctataagacaggctcaaagatggttctggcaggatccaccaccaccatcactaccacctcagcaaaatacaaccttcttcatctgaagtttcagggaagcacaaaggctcgagttctgccagcagtccagctcagtaaacactgattaagcaccagtgaagtacaaagcattaggttaaaggtgataaaagacactgaataggaggaaatatagcccctactaccttaagaattttccagtaaaaaatatggtaagactataatccaggcaaggtagaccaagtactaaaagagaaatacaaagaaggcattcagaggtttcctcaaggagatgctctagaatgaaacctgaggctattactcagatgaccaacaagttcatgctatagccactgctcgtttataattttctcccattcaatgtactacttctacaccagagatgtgagaaacttgaaaaaggctattttgttctagctgattattaaagggggagaattcttgaatataaagtaagatataaggtaaagcaagcaggaaaggatttggagcaaggtgtgtcataatgctaacatggcacaaagcaaaataattcaacttccattcagttttactggtcaaaaggaatagcatcatttttgttttattttgttttgttttgagacagagtctcactctgtcacccagcctggagtgcacgggcacaatctctgcccactgcaacttccacctccagggttcaagagatcctcctgcctcagcctcctgaggacctggcatcacaggcatgtatcatcacacccggctaatttttgtatttttagtagagacagagtttcaccatgttggccaggctgttctcaaactcctgacctcaagtgatccacctgcctcggcctcccaaagtgctgggattacaggtgtgagccaccatcacttctataacacatttatatgctgctttaatggtttacaaaggactctcacataaatgcttacaatgaaactcaaagcaatcctatgtcaggtagagactgttatcctctcagagagcctaccctcacaagacagtccacaatgatccttgcctcatgtccttgtgtaatccactcccatactgaatcagggctggtctgtagaaccaattgaatacatctgaaatgatggtgtatgacttccacaggtaagtcataaagggcactgcagtttctactttggcagcttgaatctcaggaaagtcatctgccatctcatgagaatagtcccacggcaagcccattgtggaaaggaaccaacctgccaacaccaactggccagccaaatgagtaagccaccttggaagtgaatcttttagctccagtgatgctcctataaaacttccactcctgctgatatctgacagcaacctccagagaaccaagcaaggaccctcaaattgctgacccacagcaaccatgagataacaaacaatcattgttgttttcagccactaaggttttcatgttacaaaacaacagagaacccaattttacatakgaggctcagagaggttaatttaccaattatcatataggaatgagtagagaaaacagatctggaacccagtctttaggctttaggttcaatttgtcattaaacaataccactttcttctcaactaaaataaggtataatactgtaaggatgatcattcctacacgattatatgactgatactagtatgtcaagcttcctacagtacagagacacagtatatgtccctgcattcttaacgaatataatgggaatctccaaaataagtccatttgtggtgctccattgtgctctgtggagttgttactattttctggaaaatggctatttttaatgtgcatatcatgaaaataaacacttaacacatttagagaattttaatactaaaatattactgacactgagactacacacttaaatcttaattacaataagcatctgtgtaattttaaacaattagaatatatcagacaggaaatgctcaactgctatttctttaaggttctgcattttggctttaggtcttcaaccttgtagcattacacaaatgtagtaaaatatatsatcaaaatgctcrtgatggtaaaatattaaatcaaaatccataaagtagttcctatcttacaggacaaggtagccagctcttaagcctgtccacttctggagaaggtcaagagaacattttattgttataatcacatctgcatataatgttccttcacacaaatctcctcttttgagccatataactttgcaaaacaggtaggcaggacgggtatactaccatcctatttttcaatgatggccttagagaagtctcagtaacttaactaaggatacgtaactattaaaaggaattcaagaatctaatctacaattttttagctccaaatcccagccttttcttctaagccatgttttagcccagtggttctccaccctgactgccatgaggacacctaagatgctttgaaaatatcactgcctggacctcatcccccagatacttgatataattgcactggtttgtgttagctgtctaatatataataaaccagtgttggtaaattcacagaaagtttatatcacaagggagaaaatgctgatacgtctatatgtaaactgaaacatattaaccccctaagaactccctcaaacacaaaaatatcttgcaataaaatcacgcagaacaagaagaaagggaagatgagaaacccaagccccttctgctgctatcgtggggccattaaggaatattttattcccctaatcttactccccgaacctcaccatgccatatctcaagctatagctcaggtatcaccttttgtgagaccttcaggatcacaaaaataatgaagtccattttttgcatctatcttaccttgaactctatcatagcacatattgtccctcaaagcattgctttatttttattttattattattattattattatttgagatggagtcttgctctgtcacccaggctggagtgcagtaccacattctcggctcactgcaacctccacctcctgggttcaagtgattctcctgcctcagcctctgggattacaggtacatgccagcatgcctgactaatttttgtatttttagtagagacggggttttgccatattggccaggctagtctcgaactcctgacctctggtgatccacccacctcagcctcccaaagtactggtgctgctttatttatatatccatttttctcactgccctgaggggtccttaacccatttatgctggaggttgcaaattttttttgtgaaaaatcaggccttggcgatgaccttgagaagtaggatataaataactcccactagcttagcgctccaataatggagcactaggcataaatgcattaagatcagatccctatgttactcatccttcctgccatatatatctttgtatccagggcctttaccatagcagatattaatacgtgttggctatgctgaatgatttttatgtttgttatcattatttcctccattctcctagcagacactcctgtgaaatttttcaacttttaataaaggaaaatggagtttttacgcacaactggattaggttagagaataatgtatgcaaaagggccagacgtagtgagagcaagacagcagtgaactgtggggcaggaaagaatagagtagaaaggacatttaaaattcatatctracagttggggtcagatatgaattttgcaagccgggaaggagtaggcaaacaaagcgacaacctaatcttcattcacaaaaaaaaaaatatgacaagcaaggaatcaggcaactgtattttcaacatctccctttctatggtgtttctaactcacagcatacagacatgttgtttctctctcaaaaaataaaatctgaagcagtgatatgatttcactatgtatttgacttttttttaagattccacatgtgagataatacaatatttttctttctgcatttggcttacttcacttagcataatgtcccctaggtttacctatcttatggcaaaaagcagaatctatttcttttttaaggctgaataatattccattctatatatgtactgcagtttgattttctgttgtcttttgttggacagttaggttgtttccatatattcacacccatcaagatggctactaccaaataaaacaagagataagtgttggcgagggtgggagaaaagagaacccttgtatactattggtacaaccattatggaaaaagtagggaggttcctaaagaaattaaaaatagaactaccattacttctattttgtaccaattagccatccctcttctgtgtgcatatatatatatatatatatatayatacccaaagaaaatgaaaccgcaaccttgtaaagatatcagtcggaatttttaaaagctctctaggggattctaatatgtgtgcatacagagatggagaataaaacagtgatcccaggggagggggaaggaaattgagatgtaggtcaaaggacacaaagtagcagccatgtataatgaaagagtttgggaactcatgtacagcatcagtactatataatactgtattgtattcctgacttttgctaaatgagtagattttagctactcttgtcatacacacaaaaatggataactatgtaagatgatggatgttactatgtctcactacagtaaccattttactatttacatgtattccataacatgttattttccttaaatatacacaataaaatgtattaagtaaataccctgactgaagaacaattatctcctaagagggacccaagcatatctactctctattctcatgtccagcccccttcagcctcatctcctattcagtcctttacccacagcacgatagctttacctccaccactacaatgaaaccagtgacttctaacagtcattgatgatttaactttacaatcatcatcatacttaatggccactctccttcagcatctttacatctttctcttttatggtttctcctttaaatttttacattctctaagactaatttttagcccttttctcttctctttctatacaatacctctatgtacttttatccgtatctatggatacttcagttactctccatatggtaagaacacacaaatctgtttctccagcctttgcaatctcttgtgatgttccaggatcctatatccaactgccttctagacatctcacacttgccaatgatatgccctgcgagcatgttaaacacaggtccaaagttgaactcattctcttctccctcataccttcttcctcttctcttttcccactcacaacccagaaacctaggaagcattctaacattctccctctcccatatcttttacattcaaacagtcacaaagaccagcaaattctccctcatcttacttttcctaaacattctcacttctctattcccactacttccacctttatctaagctttcaacctctcttatccctactgatgtactgtccttgaaagcttccagtcttgccatgaccccacacccaaccccactctaccctcaatctacccagcacactgctttcagtgatcttccatgacactcacaattcttcagtggctcactactacacatggtataagaagtgtaccctgaactggctatccagtttcatctaggaagtgtaccctgaactggctaaccagtttcatctcctttcactcctgaccttgtccttcacactctaatataactgacctacatatagttcccagtacacactatgttctcgtaatgccacacaactactcatgctgttagctttacctagaaatgctttctattgcttgtcaacatgcccactcctactcagttttcaagtctcagctcaaacacaaccactactaaaacccttacctggtattccaggcagagatcaagagctcttgctagatttcatttgtacttgtacctacctctgttatagcaaatagcatacagtatttgaactattggtcaagatatctgtagtcctacagactataagatccttggtcaaagatgacttttcatctttatatcctcctaactagttcaattcacacagtcactagttccatgtacattactagctcaatgcagatagatatactaaaaaaaggaggggcgaggttaatgaataaggtacgagtcaatgaaagaacaagaaaatcaactggactttgagtatagaaaaaaaaacaccagatcttaagaacgtacagacatctttagtacagacatctgttactgtagtacagatatccattactaagtcctaaccattaaaaaaaatagaaaaatatggttattcaggtagtatgaagatgacaaagaaaaaaacttattattggactaagtagacattaagaaggtaagagtttccagcggaacagttgacaaagatcaacagagaagccagagaaaaagatggttctttctaggaaacaagtaattcattgatctaaattcatggactgagcaaaagactgccacctttctctcagttcacaacccctctcctttgtcattattctgcatgaccccttctgagtcctcactaccaaatccccaataccatgggtagttcccctccaatggagccacaggtccaggccagtgacttaatctggatgcaagggcaagggatagaagggtatctttgttcttgtgtctaggactttgaggaaaaatgaaacaactatttactgagaatttattttacggcagattctgtgccacattacactcactcactgaatttcacagtaatcataagtaattatcccatttatagatgaggaatttgtgtccaaggtcaacagttaagcaataacaggccctgcctgaaaacctaagaatgacaacctccagagctttttctatacccctcactacctcaaaatggagggagacgtggtccagccattctaggttggcactcaggagacacttacctccaaaacactattatatatgttgattagagtctacagtaccactaatatatartaagcacacaatgagtttaaaaagctttccttagtacctttaggaaagtaagtactagatttcctggggttctgatctggaaatctaaatgctayttattcctataagtacattgttaactttacaaacaacagacttgaaaatgaacttgtggaatacaatgggttcttaagtaaggcttttctttaagaatattttcttgcttccacaaaaaatacaaaagccaccaargatagaatgattttgccttgttaacttgtaagaacaatgacactagaagaaacctatgggaaatgtgcttatctgaccaggtgctcattttcggtgggctgtcatttgamtaaaacatcatactaaaccctacagaccacagcttatgagagaaatgccacaaactatagcagtacagttaatatgcctataatctactgacaaaacatactcctcagtaaagtgaaaccagatgtctggtgtgaaatcagatgtctgtgaacttgtctttctcagtttycagagcrgtatcagatatactaaatacacagctaagctgtatattaaatccacaacttrgcaaaatcatgacagtttggacatgaagcatcagcatttttattgtaatccttataaaccaaagacatttccraaatggaaatcctaagtttaagtactcagctaaatacagtaatatgtctttctcactttaagaatagtgtcagggctttttaaacacattatagaaattctttcccttcatttttcaagctgacactctttatccaaggctgtggaatgatctgataaggccacatcaggtgtcagtcctcgtcccagaaattctaggatcagatacaccaggtgaacccctgtgaaaagcaaatcccagggaggcttaacagctataggaaagttaggcactacatggctttccacaatcaaaaggaagatcataggaaagtaatgggtgaccacatagaaaaacagggaaggaaatttaaaagtaagtacttctatgccaggcactgttttttcacacattcttttatatatactctttgttctgttttgatggataagaaatcaagcagcagagaaattttaatggcccaaagtgacacagctaataaaataagagccagaaatcaagctcatgtccaaaagactgtaaaagtcatgctacttctacatgaagttgtggggtggagtgaggaggggtggtaaatagccaagaagaaggagaaaaagaaagaaatttacaattttatcaaataacagtgaaatatatatatataaaacatgtattatgttccacatatgttccatatataatacgcagttaagatgtatacatgtttaacatatacttaagctgcatatttagtatgtgtatatatggaacaaaaagttgaagaaacaagtatcaaattgttaagtggtcatctgaaagtggactcataggaaactcacttattgccttttataccctcccagatttaattctaaataacttttttttgactttttattactcttataaccagaaaaagacaaagaactattctagcttagatcttttaaatgaggctaaatgcacagaaacccatgcaagttaaaaatggtctactttcgaatttatttttctaagtacatcatcctttacactctccatgattcctaatattaggtccttcttatggaacaactacaaaagttatcctcatctaattattatactcgtacactggaaaatgactataacattattcattataggaaacaaatcatcaaggtcagccatccttgtaagtttattactgaaagtactagaaaggcggaataataattctgttctcccacaacactgtatagacctgcaaaccactatgatcagtagtacagggaaagtcttgtaaattaacatgtaactattgagaaaatccacaaaactggtgaaaggcctaccccaaaacagccatctccaatacaatctcatcattctcaccatcctacttttatcaaagtgctgataaaagtgcgtagcacatggtaagagagaattagctattgaatcaatgaaggaacccattatcaataaacaatcacttcctgttttccataaattatgtggtcacctatcacttgagcacaaacaaataggcacgttcaggacacaggcagccagtatcagaataggcagcctatcacagagggcaattctacttttcctgtgtaagaatccaagaatgcagttttactacattcctgcttgtagctaatctgaatttcaactaatttaaaacggttatttatatgtgacatataggatgcataatgagctcccaaccttgtgagaggagctgtgtttcatttcaccatacaggggagagggaagcagtgtattaaagaagtgatagaaaagtcccacagaagaaccaatgaaatagaccacactgaaaatcacagtaagcctcagagaacttcagtgtcctttttggcaacttttcaaaagtgaatggaatgcttgccaggaggtaccaagagtgaaagcccagagaaaaaggcccagcctggtcatctctctcccctcaaaacatcttcttctgtaagcttgagagatcccaaagaacttcaacacttgtaatcttgttactaactttatgctttggggtcctaaaggattttttcaggagtacccttttaaaatgtaaacatccctaggggggttactgttcattatcaaacaggacctggattctttagtgctatggtctcagggattagtcaaagctggctaataagataggggccggagacagacaactagagaggaccaatgttccaaggtaaaaacaggtaaaggggaagtgcagttttctgtcgggtcaaggggctaaaagggatccacatgcccaagctgttaaactctatagactgtgtgaggctgaaaacagtccggggcctggagcctgtgactttgaaggtgggtcctccagttcccgatgaaaaggtagaatctgggcccaagttccccacgagcagttctggacatctagcccttctctctctcgctcgctctcaggataaagtcctaggtccttccacccctgaccattccttacttaccctttctcccgctcttcctcggtgagaaggggtaagtggttattttgtgccctcgcccaatttggccaaaaccctaaaagtaaaaaacgacagacagacacgtgctttaaaatcatgttgttcaagcctgacgctctcccaccacctgcccaacacttccaggcagaaggcagcgcgcccccacagcgctccctcacggccagagccgggggccggactaggcccctttgtgaggactgggagagggcgcgttgttggggcgccggctcggcggggaggagcgggccagctccgggccaggtgtgccgcctgtggcgccggtttctcaacctagttagccagtggcaccaagaagaggactaggctggggtggccgccgcacgcgcctcagataaacacgcgcacgcacacatgctcgcgatcacgcaggactcgcggccgcgcacccctccgcctcccggcaacgcccgccccgccggggccggggccgactcccagggaagggtccccagcccaagagaccaccaagggtcggcggctacgcgcccgccgacccctgccagcctcacagccccccacccgccgccggacgccgggcgcccgccctccgcacccgctgcgcagctcagcccgggggaagtccccgcgcagaccccgccctccgccggcggcaagctccgccccgctgccccgtcgcgcgctggccgcccgaagctccgcccccggcggaaaactggtctctggaccgcccgcccaggtcgggctcaaaatgcggcgtggatctgaaaggatcaaacacaacactaattcagcaagctattattgagcacttgccctaagctcagcaacgtactaatgggggagactacaataaagagccgaaaagtctatgaaactgtgtcttcagctcttcctcttgttttagaagccaggaaacagagaaccctcacagttacttaagtacagggcagtagtggcaaagcacctcactagcgatctctgggcaactcttcatttcattttttcctactcatgagcactcaggaaaactattcagttttgctgcctccaggtaaaacaaagtgagtaacacaggacaggcggtttacttgagagaaacgggaatttcatactgaagcttttgccctcaaatggtacaaactcttttttttttttcctgagacggagtctcgctctgtcgccagagcgacactgcaatctccgcctcccgggttcacgccattctcctgcctcagcctccctagtagccgggactacaggcccccgccaccatgcccggctaatcttcttgtatttttagtagagatgggatttcaccgtgttagcaaagatggtctccatctcctgacctcgtgatccgctcacctaggcctcccaaagtgctaggattacaggcgtgagccactgcgcccggccgaatggtacaaactcttaactgggttattacaacctacaaagaaaccttcttatccatgttattaattatcctaattcaatgtggtttaaaatgttgatgaaagtacccaaatcatggtgctccaacaagctggatgccaaccaggtactcgtaagtacttgcaattacaggtgcgatattttcattccatatcatcccaagatgcccttccttcacgtgaagcagccagaaagatcaactaccagattccgcatgattgaggaattgataaatagaaagggaagaccgaaaccggccaaattttcccttcgaagtgaaacttgagaaacttgcgtgcattttacctgagttcctttctcagcagataaactgtcagacctcccagatagtgtcaaggaaatgcaactttccagaacactacatctggacaatgaggtgcatctgctgcctgttcacaaactcctcttccttacccctccataattccctgctatagaaagccctaactttagtctccctaagacatgtttgagactggtctccctgccagcatcacctgcattaaagcctgtcttccctggcaatactcgttgtctcagggactggttttctttgctaggagcaacccaacctaggctgaagcccaggcatttagcagcagtggcacctagaaatactgaacagacataaaatactttttttctccttttcttactcctccagttgtatcttcattatttctgtctctattctccctctagatactgccaaactactctgtgcactttcagatcacttaatactaatgtaaataacagacattctggcactcttggttcaaaatttattctaaaggtttaagaatctactcagggtcttaaatagcctgataactaaaattccaagagtttcctaaagagagcaaaattgctctcctgtgaaggggatatgtcccagtttttcttacttgtcactgaaataattactgcaaagtaagctcttttctgccagtgcttaaggacttaatttcaagagcacttaggtgacaggaccaccctcatcaaatagcagtcaagaactatttggtaccatgaccccaaattgaatggagctcctggtcactaggaactgacagtctgggatggaatgtaggtgaataaacaacaaagacaggtgtttatggcctttattgtattgggaagtcaataaacatacaaaaagagttgctaggtctggcctgattttatcactaagattcatcaagtgtacttaaaaagaagctaatatctggaaagggcagaactatggtatattagtcagggtttcctagagggacagaactaataggatagacatataaatataaagaggagtttattaagtattaacttacatgatgacaaagtcccacaataggctgtctgcaagcttgaggagcaagagagccagtccgagtctcaaaattgaagaactttgaatccgatgtttgagggcagtaagcgtccagcacaggagaaagctgtaggctgagagactaggccagtctctccttttcatgtttttctgcctgctttatattcactggcagcttattagatggtgcccacccaattaaaggtgggtctgcctttcccagcccactgactcaaatgttaatctccttggcaacaccctcatagacacacccaggatcaatactttctatccttcaatacattcaagctgacactcagtattaaccatcacatatggagacagtaaaaagatcagtgattgccagaggtcacagaggagggggatatgaagcacagatttttagggcagtgaaactattctgtatgatatgataatggtgatgcatgtcattatacatttgtccaaacccataaaatatacaacccaaagagggagccttaatataaaatctcaactttgggtgataatgatgtcaatgtaagttcatcaattgtaacaaatatactgctctggtacaggatattcatagtcagggaggctgtgcagatgtggggtacaggaatatataggaaccctatacttcctgctcaattttgctctgaacctgaaactgatctttgggagaaaaaagtttatgagaaaaagaagcagcagttagagcatcctattttattctaatttatcaattaaattctaagctgaatatttggctttatgtatctagttcaaatatatttgccttgtctccttatatattaaagcagacctctatttgttgttaataccatcaggggaaaatgaatcataaagtcctaactaaggtacaaatttaaactatagttaggcatcaaatctaatggtcaaagagatatttaaacaaagttaaaataattaagtttacagattccacaaatatagatattaaaatatattcctatctatacatacttaccattggtaagcaaataatagaaggtatcatagagtagcagttctcaaactactttttgatctcaagttctctttacattcttaaaaatgattgagaactttaaagagctgttgtttatgtgggttatatatgtccatatttactgtattaaaatttaagatagaaaaatgttagacatgtgtttgcttaatttaaacccattacatgttactgtaaaagttatttttataaataatgactactttttttccaaaaaattaagagaaaagtggcatttttaacattttataaatctcttattatctggcttaaggagagcactggattctcatattctgcctctgcattcaggctgttgtgatatgttgttatacctaagatatgaagaaaattaactgtcatacgaattcatagttgaaaaagagaggaccttacaaagctccgggaagggtttcagtaacccctaggtgttctcaaacctcacttggagaattactgccaaatggccttttgcatttcatttgtttgaatgtcatatatttccacacaggcttctgttaacacctgaaattatagccctttacttatttcaagctaaaactcatatttgtcagctcatatcaaaccatgacatttcaataaagtttttaaaagcttttactatagcaactctgatgaaattgatattattatttgaattgatatgaaaacacttgagatttcatttatatccttcatctcaaacgttttggaaaattttgaatataaattgtaccatctggaaaaaatgtaagattggtatatagttattaatccaattttaggtatgcttataacaaggtatatccccttttataaaaataatttaaaagcgagcttaaaacaaaaacaaaacaagcaattacagttttatttatgaactaaatacttgattctaaacttactaccttggaataaaattttaaatatataacctttcatttttattacaaataaaaataatgtaaatcatccagtttggggttttttaatacaatttccaactaaaagaaactagagctgaccaaccaaatgtctgacttcagatctgggtcaggttatacacaagatgagcataggataacttgtcccacaaagccgggaatccattaacaacaaaatgtgtcaaagggacacagaaaccaatatcaaatagctcctttggccaaagatggacaatttaagcatcaaaaaaagtaatggatgcagttgttagaaacatactgaatatataaaaattcatgagttcttaatgatgttccaaaaaggggaggtcaataaaaggaaaaaaaaaatccactggacactattgcaagtagctagcattaagcccttattctaaaattgtccattaaaagaaaataattcaaattttctgatgtatctttcctgattaaactatatatcagaaaaccaaattggtgttgagggaaagttgttttttataataaatatgaaacaacagaattggaaacccaccatttagcaatcttgcatttaataaatgattcaggcaaccatcatcaatggatcaaaccaacagatgaaatgttcatgaggaacttcacaatggagatcagaccgtcactacctcagcctaataatctgtcattacaagtgggactccagacattgtgtgcttcctgatctaatgccatctgaagcactcagcacaactatgaaatgttatcacccaaaaaacatgaatgggatctaatcaagccttaaaactgacttctcacttacaggcttacaaaaaacatgagggttacaggaataagttaaatgacaccacaaagaggctgggcgcagtggctcgcacctataatcccagcactttgggaggtcgaggaaggtggatcacttggggccaggagttcaagaccaccctgggtaacatggtgaaaccctgtctctactaaaaataaacaatgagccaggcatggtggtgcgtgcctataatcccagctactcaggaggctgaggcaggagaatcgcttgaacccgggaagcggaggttacagtgagccaagatggcaccactgcactccagcctggatgacagggtgagaccctgtctcaaaaaaaaagaaaaaaagatgccacaaagaaggaaacaggtaaatctagaatggagtagaatggaggacactctctaggacaattgatgtagtctctacaacaagttaataactggacacacaggagagggaatgggtcaggagaagcctaggttaaaaaaaatacagccatgaaatgtaagatgtgaacctttatttggatcctgattgaaacatcacaactataaagacttgtaagacaatcacggacatttaactatggactggtgttagatgataccaaagaaatattattttattaggtgtaataatggcattgtgattatgtaagaaaatgtccataatttttggagaggcattctgaagtatgttgaagttaaatgacatactctctggaatttactttatacttcaacataaaaaaaaagaaggaagaaaaagagatagcataaataagaaaataaaatggataattattgaatctagatgatgaggggagttctttgtacttttccatggttttcgtatatgtatgaaattttgtataatgaatatttaaaaatataagtgacggccgtagctcagattttctagaaaacagtgcctgagacaagctcacatgttaaaattttcttgggggttgcagtactagaaaagcaataatgaaggaaaagggagaacagag

SEQ ID NO: 97419 - DNA, 18446 bp, Homo sapiens
aggactctgggctcatgtatgatctgaaggatcaaggtggagagctgttgtccctccgctatgaccttactgtatccttttgagtactggagcctgacctgtctctttccaaatccagcgggctttctctgacaaaagtggagaacgtgactttgggatcttagaggtccattgcctatacttctagtttctcccagaaggcagttctgctacggaagcctggcctggagccctgtcatttaactctagtgtgtatcataatcctttgggggagcttgcagaagcacagacatttggctgcagtcccagagattcttagctaattctgtagctggaatggggctcaataatttgtattaaaaaattgttttttttggccagacacgtggctcacgcctgtaatccaagccctttgggaggctgaggcaggtggatcacctgaggtcaggagttcaagaccagcctggccaatatagtgaaaccccatctctactcagctcctgctgagctctggggctctcaggttctgagtctagtttgggactgactgtcaccttgtctccacagatctcttttgacgtaaaaagttagctggctgtggtggcaggtgcctgtaatcccagctactagggaggctgaggcaggagaatcacttgaacccaggaggcagaggttgcagtgagccgagattgcgccattgcactccagcctgggtgacaagagcaaaactctgtctcaaaaaaaaaattttttttgtggagatgggtgtctttgttgcccaggctggttgtaaactcatcgtttcaagtgatcctcccatcttggcctcctaaagtgctggggttacgggtgtgagccactgcatctggcctacagtctgcattttaaacaagcatcgtgggtaattaagatgcatgtagtcctttccctgcactttcagaaccagtagcttagaagttgttaggcaaatccaagttctgaagcttgactattttgagatggttcggaatcgatctgaatgggcagaaagacctgaagttagttcttgggtcacttctatctctacttgccttgctttctgctgaacttttagttttgctaggtgagattccttcatttgacactattcaatatatattgaattccaagcactgctaggccttggggatagtggaaaaaagggaaggtccttgttcttaccctagtggatgagatccaggcccagtcctccctaatgtctgtatactgggcctaatctttggatgcagtatccctcttccttaacccatttatgtgaggttccctttgctcgttatctggccatgaataaggtgaagaagatgaaacgttatcatgttggaaaggtgtggcggcgagagagcccaaccatagtccaaggccgttatagggagttctgccagtgtgtaagtgacctgatgggagcagcacagtttgatagttctaggggccacaaccttgaaactggctggataatggatgttttttcccatctttttctttgctgtaggattttgacattgctggtcagtttgaccctatgatccccgatgcagagtgtttgaagatcatgtgtgaaatcctaagtggattgcagttgggagactttctcattaaggtgaggccagggctgagaactgtgggagaagtctggatttggcctaatactgtttatgcaagtcccaaacttgggtgactccaacccttaagcctgcaactgtaggactttcctagtaaagctgttgtatttcctatatgtctgtactcttcctgtgaaatttccatcctttttgtgtgtcaggaaagtaggtactgccattgttttgagtggaagggcattgacaagcacttgggtcactgacattgagttctcaggtaaatgaccggcggattgtggatgggatgtttgctgtctgtggtgttcctgaaagcaagttccgtgccatctgctcctccatagataaactagacaaggtaacaaagaagacatacttcagtagaccctatctagcttctgccctgccctcaaatccataccactagtgaaaaataaggagattgtggctggaagtgggctattttggggtggaaggtaaggaggcatactctgaaggaagatctgagtcatgctatacagtggggattgtgactggatttcttaagctgtctctgactttgctgagtatacagttagctacttgtgatgtatatactgaatggaagttgagttgtcctttttcagtttgagaaagaaagatcttggggctgggctaatgtttgggtgtttatgcagatggcttggaaagatgtgagacatgagatggtggtgaagaaaggcctggctcctgaggtggctgatcgaattggggactatgtccagtgtcatggtaagaaccagggttttcagagctgtgatagaaccaggctgaaggtgacatgtgctcaaattctacctctgaaacaactcttttctgtagatatgctaagctccagggcctgtcctgaatttaatttctcttttacttattgtaacgactttgtgtcttcagatggcaaagctagaggcaaaggaggagggtcttgtcatgtgagactgggatcttttttttttttttttttttttaaagaaaatgaggaagactagctagagcacattagggataattttgaatgaaacacatgtgagtgaacagcagagactttatttctctccaggtggggtatccctagtagagcaaatgtttcaggatcccagactatcccagaacaagcaggccctggagggcctgggagacctaaagctgctatttgaatacctgactttatttggaattgctgataaggtaagctgaattgcaaatggacctcctgctgagctctagggctctcagggtcccgagtctagtttgggactgactgtaatcttgtccccacagatctcctttgacctcagcctggctcggggcctagactactatacaggagtgatctatgaagcagtgctgctgcagaccccaactcaggctggggaggagcccctgaatgtgggcagtgtggctgctggtgggcgctatgatgggctggtgggcatgtttgaccccaagggccacaaggtgccatgtgtgggactcagcattggggttgagcgaatcttctacattgtggagcagaggatgaaggtaggtcctagataggtgtgaggtggggctggagacctaaaaaccctcctgtttctggaggtgtagttggagtggttttctgatgattctttttgtcttgatttttggaattgctggtggaaaggaggtttttattagttttactttcttctctcttattagaccaaaggtgagaaggtgcggactacagagactcaagtgtttgtggccacaccacagaagaactttctccaagaacggttgaagcttattgcagagctttgggattctggaatcaaggtatggtggagctgatatctgagccatctgggtatgtgtggaatttaggacccagggctatatctatcttatgtctggggtggaactcaaaacctttttagtctgctagctactactggctactagattggctttttagggtaggcggactagccacttatctctggctttcttggatatccatgttcctgaggtttgttgctgtgttcacttctaagtcccttactctgtcttgatccttttcaggcagagatgctatacaagaacaaccccaaactattaacccagctgcactattgtgagagcacaggcattccactggtggtcattattggtgagcaagaactgaaagaaggggtcatcaagatccgttcagtggccagcagagaggaggtgagtggcggcagcagaaatagaagggacgaagtgtttctgcctttcccagattctgtaagaaatatgcatcttctggctgagaaattatcttcatggttaatagtggtagagatgaacaaacactcactcaagatgaccattgctgcctgtgagtattgactgggtggccagaagaaagacaaatgaaatccgaatgggtattttgagactaatcaacataatagacatagatcaggtgtttgaatccctttcatcttgagggtatacattcttcaggtcaacccacactactcctttctggttgtataagtaatgggagaagatgcagagtaaaacaaatctggaaaaacagtggctaaggagttagtatcactttctagtttatcacatgaggattctcttatgtttcaggtggccattaaacgggaaaattttgtggctgaaattcagaagcgactgtctgagtcttgatccttgcctgattcccatctgctgctctttgtagaaaaggtttcctctagaactgaattcctctggaattgagtgatggacttcacaacaactagccaggaagggtgacaagtaccttctgcctcctccattcttcctgggtgcagaactgtagaagaccctgaggactcctgggctagtgtgagcagctattctgcatgggtgcagatggctggatgtgaaagagacatgctctagctgcagaggcaaatttgaagtgccacggaacgttgtcaagaggtagtgagattgttgctgtgagcaaggctctgggagagtcacctcaggctcaggattctgaaccattgagatcagaaaccagatacttagccttctactgtagctacggaaccagattctggtgaatttgtccacaatcagccattggcctgtctggggagtttttggaagacagcaaagaggggcaatggctgctttcagctttgaggacagatgctatcctaagggcatggcagtacccatgttgatttgacatctctctagcccatccattgcttacagtagaagagtggggctgtatgcttgataatcttgaacattgaacttaatagatgacttgacaaggtagagatctgatattttgagattttggagaccatttcctgtgccagaatcactgctctattccataccgtgccatggaggctgttttagaagtggttggataacatgttaaataaaatattaagtgtagtagtttgggtaatttgttattgttatcaagggctttgtttgcatagaccatagaaaatgcttgagtgtacattggagaattctgtgaggtagaagtaacctccctgggatgatgcttctgtattcagtgatgagcagccacagtttctccctctttccctgtctcctcaagaggtagtttttttgtttgtttgtttttagacggagtcttgctctgtcacccaggctagagtgcagtggcgtgatctcggctcactgcaacctccgcctctcaggttcaagagattctcctgcttcagcctcccgagtagccagctaatttttgtatttttagtagagacagggtttcaccatcttggccaggctggtctcaaactcctgacctcataatccacccacctcagcctcccaaagtgctgggattacaggcatgagccactgtgcccggccaagaggtagttttgttgctaaaaatcaacatatagtgagccggtatgccacagtgcttcactctagagtgttgttgatgactggcctttccaaatccaattatgctgattaaattatgttctactataaagttccccagatgatggaaaaataagtgaaccaaagggtggtagcattgcttcaaggaaaagagcccaagtgcaaaacatgctttttatatgtgcgtcgggaagggtgcctctgttgcaaacgtttcagtgtagtttagggtcatatccctagtgcatgcaggtgaatgagaggcatctagaccccctaatggcgcttcggccttaaaaaaggtttagaaattcttggcagtggacgcaaagttgctagactagatcagagaccactgttttgcgaacctcagtttccttgtttgtaaaatagttgaactaaatcttgaccctttaatgcttgttttgaaatccaaggcaaaaaacaattgcaagcgcccttacttccgtgttgcttcatactcctcttgcgcctgcgctgtctccttggagcagaggcggggccaacaagcctgttttagaaaccctccagtccttagctcgtttagaacacaagactccaagcttattggagggctatcttgccttacggctccaagccgctttttacggcgtttttcagctcgccattcacttcgctgtgaagatggcgtcgggcagcggggtaggtgttgtgtctgaggaggaggttttgcggggtggggaatggtttttcagacctgaatagagacaaactcctgcacccgactggcttcccgatatctcctcgagatcccagggttcaggttcaagaactccccagtaataggccttggcagagggtcagtagaatcgcggaggtttctcgggttggggtcttgaggctacctcagtcttctcgtacagtccaaagaggcttygctttcaaaacgtcctgtagacacctggaccgcgagggcgcggttccctgcttctctaggggcccagacacggcgacggatcttgacgctttttcctccccacagacaaaaaacttggactttcgccgaaagtgggacaaagatgaatatgagaaactcgccgagaagaggctcacggaagagagagaaaagaaagatggtgggtgctaactacatcaagggctaagggtatcacagaggcgatgcgatgatggagagcgggtgggagttgaagtgcgctgccttcccacgcggtgtaagctctggcasagtgctgcttccctgggcctaggtttctgcatttacaaaatgagagcgaggaggtgggatgaagtaagtagttttgagatgctcttcagctctatttcactctgcttccttgcccaccctttgcttggctcgtttaatgctttcctgaagtacagagaagataacggcatccttagtagtgacagagaagttaagtagagtattttgctgctgtgcattaccgctatcagtgacccccctctttcccttgaaatttcttaagggagagaacattcctggcccaatcaagaccctcccatatagtctgagaaaagccggggaactttgcaggatctgtgattgtttcagctagagcttagtagtgctgtttctctgtgccttgtacatcagggagttggtgcttctctcctgtttaagagattgcataaagaaatgttttattttgtcatctgtttcaaacgtgtacattcttctttccctttacctccaggccaccttgcactcactaactctttcattttttatgtaacatgtaaaataaatagtgcttgacatgtaacaggcatttcctagatgttggtccccttttataaatttgcccagctctcagaaggttcctttccgttatgcctagggtatctgcctgaaagcattcttgaatgtccttgctcccgttttgaaaaagttgcttctagtaattcttcagaaattctcccccacaattcagttaatcaatgaatataaaacatactgtttttagatttgctggctttaaagtggagaaaagctgtagagttgaggattgcttatgatttyttcctgtgttgagattctccccagctgctactttaagtgtctgttgtgtcctttcaggaatgattttgaaatgagtaagacctgaattttggatttcatgcattttttttcctttctggttgaggaactataatattgaagggacttccttccccattatgtttcaggaaaaccagtgcagcctgtcaagcgagagcttttacggcatagggactacaaggtggacttggaatccaagcttgggaagacaattgtcattaccaagacaacccctcaatctgagatgggagggtgagttgcttatcatttttcctctgcagccaagaatgcatctaataagccacctattttggttttaggaagtgttraggaaggtccttggccccaggattacgtccttcttgcctgtaattctatctttatatttgtttttctgtgtctcccaaggtctcaagttgacatgatagtgtctctaggartggtcactcagtgggtttcttcatgttattagcattggctgggcacagtggctcacgcctgtattcccagcactttgggaggccaaggcaggaggattgcttgagcccaggaattcaagaccagcctgggtaacacagtgagaccctgtctcaattaaaaaaaccaaaacaaacaaaaatcatactatgagcactacagctactactcaatatagtttttaaattttttattgccattgtacttgttatcaattctgatttactattaatattttaaaagggattatttgatctgtcagaagaagaaatgaaggaaaggactactgaggagatttctaggagagaaattaggtggagctagaatagagcctaggagttgttaatggtgaagaagaggggtttgaggttccagactagctgcaaaggctgtagttgttatggatgcctgattgtacaccttcttccaagactataacctataggaagaagggtcctacaagagcttgtcacccttttgccccccactgcttctctgtccagttaggttttctggcaggagagcaacacagatagcaatgagtgacacttctctgagctgcttagtaaacccactgttgtccattcctgtctgtattagttatctattgttatgtaaattaacaaattaacctaaagcttagcagcataaactacaccactcacagtttctttgggtaaggaatctgggagtggcttacctaggtggttctggctcagggtcttcatgaagctgcaatcaaggagttggcaaggtaggtctgcattcatatgaatcttaagtggggctggaagatctgcttccaagctctctcacatgcctgtggtttggaagcctaagttctttgccccatagacctttcttttttctttttcttttttcttttctttttttttttttttctgagacagagtttcactcttcttgcccaggatgrartgcaatggtatgatctcggctcaccacagcctcgcctcctgggttcaagcgattctcctgcctcagcctcccaagtagctgggattacaggcatgcaccacctgatttttttgtatttttagtagagacggggtttctccgtgttggtcaggctagtctcgaactcccgacctcaggtgatccgcccgcctcggcctcccaaagtgctgggattacaggcgtgagccaccatgcccggccaccccatagacctttctataagactgctcacaataaagcaactggcttccccagagcaagtaacccaaacaaagacagaaggcatggtttttaaaataacctaattttggaagatactacttttgacatattctattggccaaacagaccaactctggtacaaattgggaagagactacacagagtaggaataccaagagggtggggctcatcctggggctgtcttggaagatgactgctatactctctcgaaagctaaggctttatagaaatgaaggcttaacacttctaaaaagaagtttacctaaaaatttgagtttcttggttgaaaatgataagatccttaaaaccatatttgactcaggtgctgtttcttcctgttagatattactgcaatgtctgtgactgtgtggtgaaggactccatcaactttctggatcacattaatggaaagaaacgtaaggcttggaggtagcttgtgactagggctggaattgggttttggaggtggggtggaatggaagggtagctttttttttcttctttttactcatcaaaagatggctggartaagaagggtagtttctactgggctcttttttgatgcccctattagaactctccarttgtttcagcacaggccgtcttttacttcattatgtaatatttctggaggccgtgaggtaagaggcctcattctggaggccatgaggctttcaacagcacccaaaccatgtgctgctcctggacccagctggccaagggagtttcttttagccataattatttttgctgtgtgttttatgagatgtcagagaagtcaggaaaataatttttgaggggctgaggatgttgtaatgaacttgccttcttcactgttgaccctatgcagatcagagaaacctgggcatgtctatgcgtgtggaacgttccaccctggatcaggtgaagaaacgttttgaggtcaacaagaagaagatggaagagaagcagaaggattatgattttgaggaaaggatgaaggagctcagagaagaggtaagggtctcctatccttcccctctcccccagatttgagttttatgttatgaatcatgggagaccctgtcctcatcccactcctactcccacccccagagttgtatctcctgagttctgtatattagcggaaacatttgttgcctttgtttaggattctcatgatctgaaggaaatggctctgaaactacttttttctcctagactctctgggccttatttttttttttgtaatttwwaaaaaaattttttttttttttggtcatacagatatttctcaacttctgatggggttacctactgataaacctatcatcaagttaaaaatatcataagtcaaaaatacataatacacctaacctactgtagtttagcctagcctaccttaatgtgctcagaacacattagcctacaattgacccaaattatctaacacaaagcctattctataataaagtattcatctcattaatttattgaatactgtactgaatgtgaaaaacaatggttgtatggatacttgaagtacagtttcaaatgcatgtcagtttttcaccattataaaattgaaaaatcttgtcagcatcataagttgaggactgtctcatctgtattctttgatttaatttttttaaaagactaaactttttttagaggagtttaggtttgcaacaaaattgagagggagttataaagatttcccatatacccactgtcccccacaacatgcatagcctcccccataatttttttttttttttaactgcaagaggaattaactaaatgtacctagtcctaaagagacccatgaaatcaggctgactgggtcaaaattctgtttcttccacttactggctgtgaatcttgggcaagttatataacctctttgtgcctcaatatccccatattagagatcttaatatacatgaagtactcagagcaatttctggcatgtactgcatgccccagaatgttagttgttgttacaaacaacatttggctgaggagtctaaactgattctgagtgatttttccctccaggaggaaaaggccaaagcgtacaagaaagagaaacagaaggagaagaaaaggagggctgaggaggacttgacatttgaggaggacgatgagatggcagctgtgatgggcttctctggctttggttccaccaagaagagttactgaggctttctgtgcttggcctgactttggcctatgctggacctaactttgcgtgtgtgtgtgtgtagtrgggggtcatttctttttgggtaatgggaaagttcttaagagtgtcaatggggagggatagagggtgggggctcatggtttccctctactttgggagagggcacagattgcagaggtaatgctgtggcatattgcttctgcctcagtgtatcactggagtcacaggaccctgcccacctgagttcccaataaagaaaaacctccccttctgaggctgctttcccaaaactccccctgcatctttatctcttcatctatcccacctcttgtctgaacatcccacctttatcctgtgttctgcctttgttttaattttaactcatgttcatcctgcaacagaagcattctctaggtcccagtttccagttgattgcatatccttgatcagccctttttcccatcctgccctatggttctctagccacctgtgcatgcatgtgtatttctgcctggttctatggtgtgtggatgtgtgtgcatgaatctgtcatatagagggggtccgagctggaatcctagagcattgctgccctggggcctgatgttcttggcttcctcagagcatgtaacaggaaattaaatgggatgagtgtttggtgtggtttgtgtctgatgagttttttaacattcaggtgtagattgtttcagcttctcwtgtttcattttcctgaagawttatgtttttgtctaccttgtgagcaggyttttggaagaacctgtttgatgcaaaaaagaaaatgaaaaacaaaacaaaaaatccccaaaaccttattatgggagcccktcggtcttagaagctgtttgacatgtataataaatggcattgactgggcctgttttacatttggtgagaacattccataatcttccctgtgaatatttgtttttccttctcatgctgaggatttccatatagagtattttattcttccattttaaatcttatttttgcctaggtttttttttagcatgagttatgttttcgtctgataagggatctatgtccagagaagtctgaaccaaaacgattcctatcatttcagactcctttgatcttttgtttttggaacagcagagctcaggattgaacataatgttttttcttttttttttttcttttttttgagacagtcttgctctatcgcccagtctggagtgcagtggcgtaatcttggctcactgcaacctccgcctcctggcttcaagtggctaatattgtatttttagtagagatggggtttcaccatgttggctaggctggtctcaaacccctgacctcaggtgatccacctgcctcggcctcccaaagtgctgggattacaggcgtgagccactgcacctggcccttagtgtttttcttactgtctgctagacacagaattacttaattttggcactgttgagattttgggccagattatcatttgttgtagaaaccaatgctggcattgtaggatgtttattattttgattttgatttaggattaacttcatccctggactctacctgctagatgccagtagcaccctcttccacaattgtgacaactaaaaatgtctatgcctctgagaaaggcaaaatccctccctacccacattgaagaccactaagaagaagctagctgtcttccctaccttggtctgatttgagaattagatggcacagactggcaaactcaaaacagaaactcacaaaactttgatatccactggatcaagtactatgccaagtcaaggggatgcagaagaaaaaaatagccatacatacacgaagaactacagtcacattaacttcaagcagatgaagcctgtaacttgctggttctataccctgaaaaaatggacctgtaaatgaatctgtttgggttaacaaggctgccaccatatagctggttttcattctctgccccatcaagctcctcaactttctgtattatctgaaccacaaagcaccatacacctccctttggacttttgtacaaaattcccttactgtaagacatgccctttgtctaatttctgatgctgaatcttgccactgggaacactgaatgtatcttcacctatgggctgaaggcctggctcagttttagatacagtaagtactgggcaactgggggcagattggtgcgtgctttccttggcaggattatgtgcacttcaggtcccttgggtgacagtcttcttgttgactaggtattttgttacccctttcaaggcaggctggaggtttgtgagttccttccatggttcagtttttttttttttttttttttttttttgagagtgtcactgtcactcaggttagagtacggtggcacgatctcagctcactgcaacctccacctcccaggttcaagtgattctcctgcctcagcgtcctgaatagctgggattacaggtggccgccactatccccagctaatttttttgtatttttagaagagatggcgtttcaccgtgttggccagctggtcttgaactcctgacctcaagtgatagccctcctcggcctccccaagtgctaggattacaggcatgagccaccacccctggcttcattcttcaggaaaccatctagttcaatttagcttcaaagaatgtctttccctttttggtacagtgggatcttacctctggttgcatctaaaaagcaattctgaatttaagaatctttaaactcttgggactggttaagtggtttgagtctcaaagggacctaagtcatggagtgtctggaggtgctcagggtggcatcttggaaaagtaaatggaatggaaattcaagagcccacagcaatcccagataactcagaaatctcaaagagaagctgctttcaggtcttttttgagacagtcgctctgttgcccaggctgaagtgcagtggcgctatctcggctcactgcaagctccaccttcctggttcatgccattctgctgcctcagcctcccgagtagctgggattacaggcgcctgccaccacgcccggctattttttttttttattgtatttttagtagagagggggtttcacatgttagccaggatggtcttgatcatctgacctcatgatccgcccgcctcagcctcccaaactgctgggattacaggcgttagccaccgcgcccagcctctttcaggtcttactaaaaccaatagaaatgtttgcattctggttgagtaatatccacttgaccagtgcttaggtgaacatgctgtaggtactggtattatcttctggggcaacgcatcaaagtcccagatgtcatggaatgtacattctgctggaattgcccttcagagtacctggggaacaaaagatgatccttattattaaagatgatcctgtggcttcaggcaccctcaaggcctcttgcatttcccccataactttctccaaatatgtgtgcagattctttaatccagcatatattctaacaacatacttgtgtatgtgtacatatatgtaccaagatgtgtattactgcagctttatcttagtgaaacttaaaactagtacatttatacttgaatataatgcagctgttacaatacaagtgaattagatttatacgcagtgatcagaaggatctccaagacatgctgttaggtaaacaatatccaacaactggattcccagcaagccaagaaaaattacgttttgtgtacagttaaataaacagattgaggaaaaggactggaaggatacacattgaaatataaacagtggttaattggagaaaagtaggaatttagggaagaaaggttagctgtttacagtatacataaaaggaatagatgttcctgcagtattaaaaatggaaataatttttaggccaggcatggaggctcacacgggtaatcctagcactttgggtggccaaggcggaaggatctcttgagggcagttacaggtcaactgagcagcatagcaagatcctgtctacagaaaataaaaaataaaaaaggcccggctcggtggctcacacctgtaatccccgccctttgagaggctgagggcagcggatcacttgaggtcaggagttcgcgaccagcctggccaacttggtgaaagctcttctctactaaaaaatataaaaagtagctgggtgtggtggcgcatgcctgtagtcccagctacttgggaggctgagacacgagaatcgcctgaacccgggaggtggaggctgcagtgagcggaggtagtgccactgcaatccagcctgggcaacagagtggagactccgtctcaaaaaagaaaaagaaaaaggaaaaaaaatttggccaggtgcggtggctcacgcctgtaatcccaatactttgggagactgaggcaggtgggtcatgaggtcaagagaccgagagtatcctggccaacatggtgaaaccccatctctactaaacatacaaaaattagctgggcgtggtggcgtgcgcctgtagtaccagctactcgggaggctgaagcaggaaaatcgcttgaacccgggaggcggaggttgcagtgagccgagatcctgccgctgctctccagcctggcgacagagcaagactccgtctcaaaaaaaaaaagaggaaagaaaagaaaaaaaaagccagaaaaaaaagctcacgcctgtaatcctagcactttgggaggccgaggcgggcgcgtcacttgaggtcaggagtttgagaccagcctggccagcatggtgaaaccctgtctctattaaaaatacaaaaattagccagaaatcgctggaacccgggaagcggaggttgcagtgagccgagatcgtgccactgcactccagcctgggcaacagagcgactccgtctcaaaaaaaaaattagttgggcatagtggcctgtgcctgtagtcctagctactcgcgaggctaagaggggcgtattggttgagcctagatggagccagtgcactgcggcctgggtgacagagggagattctgtttctaaaaaaattaaaaagagtaacaggaagtttcactgggcgggggttggaatgtttatctagtttagcagcgaagttctaagataaggtctgaaatacaatttacaccttgtaaagactccactcccctggcccaagcactagttgtaaaagtcgatttgatcacgaagtgaccctgtgtggttgttttgggagcgcagagtctggaagcgaaggaggtgggggcgtttcgagagttgtggaccaggtgactgctgagaaggagacagtaaaccggggacacacctgcggaagagctcttcagggattaggaaaggctacgtccttgtcactgctgtgtgtccccagatggacaactcctcaattgtctggaggtcgggggcgtgttggacagtcctggtcgctgagtcatgctgaagcactctctttttgactcactctttgtgacgtaggtctttctcaccagtcaataaaatataatccgaaagcaacctccgggctggctttagctcagcggttacttcgacagttctttaattgaaacaagcaacctgtctgggttgttcgagacccgcgggcgctctccagtccttttacctctctgggcggttcgagacccgcgggagctctccagtccttttcactgctgaagttcagctccctttccatggtaaaaggaatcagggctcctcggagaaatggctgattttagtactgggcaggaaatatagaaatggacgtggagcatctcatagagctagaaagtaaggaaatgcttaaaaaccaagaacaaccaaactcaacttttaaagttttttcaatgtttagtatgttcatgtgtttgttctaacagttgcctgtatacttgtatcttctcgcccttttttactgaggcccacaggatttttttctttcaaatctaatggatgttctaagatataccttagacttgatcattccatataagttttcctaggtttcctttcgatatgtagacccaatttttttttattatagttttgaagattacatcggttccattattttattcttcttcagggactgcaatgtatgttggatctttgcctctataccactttctctctgatcctttgaattgctttcttgattttatttttattttattggctgttttaatgcctttcctcaataccagttattatattttaagtaaaagtttttcctctttggaaaagctttccttatgatttagttttcttttcagagattttttttcttccatatctcctgcttttttacaaactgcttattttgttctttgtccatttctgttctgagttatttttctgattcatggcatttttttcatgttaccaaatgattgcttaaggttatctaatttaggttgaagtactgtgtttcagttttctggtttcatggttagttttcaaaaaaatattgattttcacttaacctttttctatataccatgtctgcaattttctgtgcattttgaaatattttattttccagtttcagcaattacaaatgaggcagtagtttgggtgccttaccagctttcttacttgaagagtgccctcttatttttgttttcgtttttttttttttttttttttttgagacagagtttctctcttgttgcccaggctggagtgcaatggcgcgatctcggctcagtgcaacctccgcatccccggttcaagcgattctcctgcctcagcttcccaaatagctgggattacaggcatgcgccaccatgcccggctaattctgtatttttaatagaggcggggtttcaccatgttggccaggctggtttcgaactcttgacctcaggtgatccacccacctcagcctcccaaagtgctgggatt

SEQ ID NO: 97420 - DNA, 98914 bp, Homo sapiens
cgggtggatcacctgaggacaggagttcaagaccagcctggtaaacatgatgaaaccccacttctactaaaaaatacaaaaaaattagctgatcatggtgctgcatgcctgtagttccagctactcgggaggctgagaatggctgaacccaggaggtggaggttgcagtgagcccagattgcgccaccgcactccagcctgggagacagtgcgagactctgtttccacaaaaaacagagtaaaactgagatagtgaaatactaagagaaggtatttagagggttttgttcagcttttaatgtttgctttcctcccagtaagggcataagccccacctgcaagccttctccagtgttatagaaactggctttgtctctatagacatttctgtatgtacagatccatgctgatttgaaggtagtccttacactggatattcctctgccacgttttttgaacacaatttagttacatattgcagattacctaaaaccttcaaagaaaccaaggcactttcatgtatgtattcttgcttttcaggtttatttttacctatatcatatttctgaaggtagtgaacaagtacagtatttgaataaaactttctaaaacattaagtaaggataaaggaagatgtgacatttagttataaagagcaaaaattcattcaagtaggctaattgattaagtggtagtttattacaagggtgcaagcatccaagaataggaagtccaagtaagcttcatgagaattaaacatactacactttctctccctctctctctctctctctttgacttcattgtttcttgtctctacttcagtcttttcctctttccactgacttgtagttgcctttacacagttgtctttcttaagtttctggtcctagcccatgtaaaagtttagctactatgtcattattctgtcataattttcaagatttcactataaactgataactaatgccataataaagtccgtaaactgttaaactgttttctctttgaaggacatgagagaggtagaaattcagtctgttatttcagctaggtcatagagaaaggaatttgtctagtaaaagcccttacttatgaaagtattatattatgctcaaataaaaatgcatatgaagaatgtttaaagcagctaatacagaattgtgatataacaaatatagtggctagatctaaataatttattacgtatcttgacatacatattaacagtagtgtgttgatttgattctctagttaaatttgcttttgcaactcattcatttttatgtaatattccagataacaaatgtctttgtcctttccaatctcttaacctagaataggatgtaataaaacggaaacactagtgtaactgtattgcattttgagatgtgggatggtgggtgttaaagtattttaaacagaaaaagaacataattttctagaaattggggaaggaaaagggcagaaagtttttttttaatcgaatattttgtttctaggtcatcccagaatttaggggaaaaaaatctaatattttgttctgttacagtaatttatcaccatttaattggtttaagtataattaaacaattttgagtaacaaaattttaccataagtgttttgcaggttcaggactgtggagcccttctatattggttccatatccctaaagtgtcatttctttagacctgataaagatcagacacagattgaatagttagttaagatcatgctcgtaggctaggtgcggtggctcactcctgtattcccagcactttgggaggccaaagcaggtgggtcacttgagttcaggagtccgagaccagcctgggcaatgtggcgaaatctcatctctaccaacaaatacaaagattagctgggtgcggtagtgctcacctaggcaaaaaaaaaaaaaaaaaatcatgtttgttttcaaggcctccacaaagataccttgtaaaacaatttgaaattatttctggacacaataaacctaatttatttattgagatttagactattttgtagtatatgtattaaaattagtcatgttgtgaaacaatttggttaaattttagctataaaactgtgtataaatcaaagcaggttgattttatttttacatagtggttatattatctgtctattttagatttcctttcctggatgaaaatgttgtctcctttctaaattctctgccgatttgggaaaaagcaaacttgactttaccccgaggaattggtgaaaaattacttttacgccttgcagctgtggaacttggtcttacagcctctgctcttctgcccaaacgggccatgcagtttggatcaagaattgcaaaaatggaaaaaattaatgaaaaggcatctgataaatgtggacggctccaaatcatgtccttagaaaatctttctattgaaaaggagactaaattgtaatgtgattcacaatgtaacaatataaaaataagtttttatataattatataaaagtaagatactctgctgctttactattgtataatatagtagttttaaagttcatttggttgaattttcattttttcctgtcacagagcttctaaaaccatggaatttccttagtgatagggaatatcttttgttgttcataataagccccttttgatcacacctgagtttatgctaatgcggtgacttagggtgaggtctctaaatagcctttaacacctgcagcttgggaggccaaggcagagggatctcttgagtccaggagtttgagaacagcctgggcaacatgatgaaacctcatctctaccaaaaaaaaaaaaaaaaagtacagaaaattagctgggcatggaagcatgtgcctccctactcaagagtctgaggtgggaggatcacttgagcccaggaagttgaagctgcagtgaggctaggatcataccactgcactccagcctgggcgacagtgagaccctgtctctaaaaataaaaataaaaacaaaaataaaaatcaagtgattagaagagttggaatttcatccccacccaccaacctctgggagggagagtggtgctgaaaattaaggtctattaaactttataaaaactcttgaacaagatttgatgagcctctggtttgctgaacatgtggaggtgctgggagtgtggtatgcccagagaggacaaggaagctccctctcatcttaattttttttaatactttgccttatgcatctcttcaatttggctgtgcctgagatgtatcctatataataagccagtaaacgtaagtatttctatgagtgctgtgagccattctagcaaattatcgaacctgaatagggggtcatgaaaacccccagtttatgtagctggtcaatcagaagtaccagagatccagacttgaaattgccatctaaagcagagacaccttatggcactgagcccttaaatggaaggatctgacactcactccaggtagatagaggcaggattaaactgtaggatacccagctggtattcagagagctggagaattgcttggtaattctccacacatctggtggaaaaaatccacacatctggtgtcagaagtgttgtgtgagagtgaagagaaacagtttgttttcccagactcactctctttgatcactccatccagaaatgattcagttccctctcttcagggaccatggtttagacagggtcctgtttcatggataaaagaactacaggtttaaagaagctaaacaatttgcttgaggttcatcctcctgaacagtacttgttacttctattacatctttttaggcagctcattttcccaccccagtaacttttaaagactacagttgacccctgaacaacacatttgaactgtgcagttccacttatatgtggattttctgcctctgccaccccgagacagccccttctcctcctcagcctactcaacctgaagacaagaataattacgtcttcctctacttactatgtcttgcctctcatccacagtcactctctccacctttttgtctatttactccaacctgacatccacccacattactcaactgttaactgccataccagtgtcactgtgaaatctgtccattaggatcgacaccatttctggatctggccaccctttgattctttaatcacagtagcaaataaattttaggatccggacaaacaggtcagtaacctggcaaaggctttcacatgccccgaatttattccctggaagatgcaatgttcaaccaaaatttagatactgcctacatagctttcatccctcaatctgaaagcagacaacttcaagtgtctgtgtgggcctgagcactaaattgacattgcttatattgggagtagatgaacttaagaggtttgccccacggcctagaattgaatattataacaccaatacagtttaatactgaaaatagctataacttatataatgctatattccaggtgctactctatgagatttaaatgtattaatcagtcaaacttttataaggaatttccaggtcatctgctccaccagaatactgagagagacagagagaggatacacatgcatgtgtgtgaaccccaagagggcctgggcatttacaaccttctgctattcaatcccattagctctgggatggagttctgtgttgatcctttaaaaaatgaggcatctctttccgaagatttgagacacatggaacaaaccatttggctacccagggggaaacaatccttgaagtaggagaatgtacatatatggttcatatttcttaagtgcaaacatgcaaatctttgtaaaaaaaaaagccctggaatagtcctcataaatttattaatatttatttccatagtagctaaaataatgacatggttactggaagagaaattctgccccaaacagtcaccaagaacttccaagctgctgcattcagtggaagtttgttctcatctcccctgaccgagcagcagcatccgataaagttggccattccttttttttttccacacacttctttggcttctgtgaccaattttggttttcctcctgccttcttggctgttctttttgtcttctttgctgacttcactctctctacctgacgtttaaatgttaaatttctcaggtctctaatccttggttctcaactcctcattctgcacgctctcccttggtgatttcaaccccactcctggcttcaattactataaatctgccaaaatttatacatctaacccctactgccattcttagcccagaactgtttatctaaagcatatctcacatctcaatttctctcacaggtacttcaaggtcaattagtacataactgaactcttaatcttgccctgatatcctgttgctcctgacagaaatgtggttctgacttggacacaaccttctttttcaacatatccccaatctgtcaccaacaggcaacctcattatttttcaaatctgtccacagtccctgagccccacctccactgccactactgtaggctaatcctttgggatgaaattcaaaatcattactcagcagcctgcatgatctgtccatcgcgcacctcagcagctcggtttgtgcccacatctctcttgttctctaagcagggttttgcggtttctcaaccatttcaactttgttctcacttcaattctttctctcctgctgttccctgttcctgaaaagctacttgtccagtcctttgcttgggtagctcttttccatcttctaggctcggaggggaaaagggcacttccttaggcagcctttcctagccctgggctaggttagctttcattcgagtgctgtcattccatctaatattggcacactgttaaatatagctgtgagatgatctgttcaactgtaagctccttggggtttcgtgtctgccctgttttctagggtttccagcttgtagctgggtgcctgactcataataggtgttccataaatgcttgttgaatgaaagaatgatgatggaggtggtattccaactcgggactgcctcaacgcccggcgctgtctcctctgctactctgtttcggtgttttagcagaggcagatagtgagggcggcacagtgcccacggcatgccgctggactaagcgctaagcgggcttgggatgatgcgcacgcggggggtctgagccagccaaggggccgggcgccgcctgggggcgctgcggctgctgcgggacgcaccaggcctagtcgcccgcaggctccgcccgaggagcagcccagccaccccagggcccggaggaccaaccgcttcgacccgcgcccgggcggcggcagtgttggccggcgaggcgaggagggccgggccgccacggtggggcgaaaagccctgaaagttcctctcagttccttccggtgcgcctcccgctcgcccttgcggaggccctgagggcggattcaaggccccgcgagaagccatctgaggcggcgacgactgttctcagccccacgggaacgccgcggacgcagcgtccctctcccggacaagaaaacagccattctagagtaggttcctcccctttccttgttttttcccctttcccgtgcccatggctgacgcgagctgcttttggacgtgggtcccgggcttgactggacagacgtgggttctgtttctgaaaggcgtaaaacctcagacttgtcctgcaacctcctggtctccgtttttgcctctataaagtgggcataacaaggtctgactcactgacctggggtctcaggtgtggcgcccaaaccagcactatcagcatttcctgtaactttactaaaacgcatattttctggccccactacagctcattgaatcagaaactcagtggtgggattcagcgatttgtatttgaacaagccccaggtgattttgatacaagctaaatttttgagaaccactatataatagagaccaatcagatgaaataaatcaaaccattatatagtaaagaacctggctcaataaatagtagttgtggttattattatttcaggaatagacaggcattcattggcacagaaattgaaggttaagcaaatgcttctttccttttctttttcttttttttttctttttttgaaacagtgtttttcacacttgttgcccaggccaccgcaacctctgcctcctgggttcagcctcctgtctcaagccccgcgagtagctgagattacaggcatgtacgaccacgtttggctaattttgtatttttagtagagacggagtttctccatgtttgtcaggctggtctcgaactcctgacatcagttgatctgcccgacttggcctcccaaagtgctgggattacacgcatgagccactgcgccccacccttttcttttctttcatgcaggtcagtatagtcttgctttaaaaaactgaaaacaaaataaatatccatatgatttggatatttatcccctccaaatctcatgttaaaatagattccccaatgttggaggtagggcttggtgcgaggtgtttggattatgggggtggatccctcatgaatggcttggtgctttcctggcagagtgaactctacctctgagctcatgaaagatctggttgtttaagagtagacacctcccctttctctctattgttccgtctcttaccatgtgacacactggctccccttccccttccgccatgattgtaagcttggtctcacmagaagctgagcagatgctggtgccatgcttgtacagcctgcagaattgtgagccaaataaacctcttttctttataaattatgcagtctcaggtattcctttatagcaacacaaacagactaacacgaacatatacaaaagaatgcctctccaacaacaaaataggtatgtaacagtagcttctcacagataaacttaacgtttctttttgacatacatcttcttgtcttttgaattctttgaaaagcagaacatggttaatgataaaggttttataattttaattattttaattcaaatttcagttttcatatactgcagttatttttaatttgaaaactataatggttgaccatgaaaaattaatcttatgtaggtgaaaggtacagatttatttctagacaaatccagtttcattggcatgtcagattttattgataatcttttccttcttattcattgcagaagcttcaaaaaggacacactagatttaattagaaatgttaagattgcccaaaaaaggattacctagatttgagcaagttcaggatgaagacacctacctggaaaatttagcaatacaaagaaatgcatctgctttttttgaaaaatatgatcggagtgaaatacaagagttactaactactgcactagttagctggttgtctgccaaagaggatgtgcgctctcaagtagacctcccatgtggaattatgagtcaaatgaataacgtaggcttctccactgcaatcctactgactcccgtggaccctactgccctcttagactatagagaggtccatcaaatgataagagagttggctattggaatttattgcctaaatcaaatcccttccatcagtttagaagctaattatgatcagagttcttcttgtcaattacctccagcttattatgataccagaattgggcaaattctgatcaatattgactacatgctgaaagcactatggcatggaatatatatgcccaaagaaaaacgagctagattctctgaattgtggcgtgccatcatggacattgatcctgatggaaaacctcaaacaaataaagacattttttcagagtttagttcagcaggtaagagaatttaacacttcttaaatttttttttttttttttggaacagagtcttactacgtcacccagggtggtcacgaacccctgagctcaagccattcacccacctaggcctcccaaagtgctaggattacaggcatgagccgctgcacctggccacttcttaattatttttattcaatgccatttttaaaatttttaaattttatttcgatagtttttgggggaacaggtggtttttggttacatggctaagttctttagtggtgatttctgagattttggtgcacccatcacctgagcagtgtacactgtaccccatgtgtagtcttttatccctcattttcttcctacctttcctctagaayccccaaagtccattatatcattcttatgcctttgcgtcctcatagcttagctcccacttataagggagaacataaaatatttggcttgccattcctgagttacttcacttagaataatggtctccaaccccatccatgtttctgtgaatgccattatttaattcatttttatggctgagtagtatttcatggtatatatattttctttctttctttttttttttttcttttttggagatggggtctccctgtgttgaacaggctggcctcgaacccctggcctcatatgatcatcccatcttgacttcctagagtgctaggattacagacatgtgccactgcacctggccaccacgtattctttatctactcattggttgatgggcctttagactggttccatgtttttgcaattgtgaattgtgctgctataaacatgcatgtgcaagtgtctttttcatatagtgacttcttttcctctgggtagatacctggtagtgtgattgctggatcaaatggtagttctacatttagttctttaaagaatctctatactgttttccatagtggttgtgctagtttacattacaatcccaccagcagtgtaagtattcccttttcaccacatccatgccgacatgtattatttttttatttttaaattatggccattcttgcgggagtaagatggtatctcagtgtggtttgatttgcatttctctgataattagtgatgttgagcatttttcatatgtttgttggccttttgtatatcttcatttgaaaattgtctattcatggcttttgcccactttttgatgggattgtttgtttttttcttgctaatttgtttgagttcctggtagattcyggatattagtcctttgttggaagcataatttgcaaatattttctcctactctgtgggttgtctgtttactgattgtttcttttgctgtttagaagctttttagtttaattaggtcacatctatttatgtttgtttttgttgcatttgcttttgggttcttggtcatgaactgtttgcctaagccaatgtctagaagggtttgtccgagttatcttctacaatttttatggtttctggtcttagatttagttctcgatccatctcgagttgatttttatataaggtgagagatgaggatccagtttcatgtggcttgccaattatcccagcaccatttgttgaataagggtgccctttccccactttacatttgtgtttgctttgtcaaagatcagttgcccataagtacttggttttatttccgcgttctctattctgttccattggtctctgtgcctatttttataccagtaccatgctgttttgttaactatagccttgtagtatagtttgaagtcagataatgtgatgcctccagatttgttctttttgcttagtcttgctttagctatgtgggctcattttggttctatatgacatttaagattattttttctagttctgtgaggaatgatgatagtatttctatgagaattgcattgaatctgtagattgcttttggcagtatggtcattttcacaatattgattctacccatccatgagcatgggatgtgttttcatttgtttgtgtcatcaatgatttctttcagcagtgttttgtagttttccttgtaaaaattattcacctccttgattaggtatattcctaagtattttattttatgttatgttattttatttaactttatttaattttgttttttgcagctgttgtaaaagggattgagttcttgatttgagtctcatcttgtttgttgttggtgtatagcagtgctactgatttgtgttcattgattttgtatgctgaaactttactaaattcctttatggcatctaagaggtttttagatgaatccttagggttttctaggcatatgatcttatcattggcaaaaagccacagtttgacttcctctttaccaaattggatgtctgttatttatttctcttgtctgattcctctggctaggacttccagtactatgttgaatagaagtggtgagagtgggtatccttgtcttgttccagttcttaggggaagtgctttcagtgttttcctgttcagtataatgttggctgtgggtttgttatagaggacttttattaccttaaggtatgtcccttctatggccatttcgttgagggttttaatcataaagcaatgctggattttgtcaaatgctttttctgcatctattgagatgatttttgtttttgattctgtctgtatgatgtatcacatatattgacttgcatatgttaaaccatcccttcatccctggcacgaaacccacttgatcatggcgtattatctttctgatatgctgtcagattccgttagtattttcttgaggatttttgcatccatgttcatcatggatattggtctgtagttttctttttttgttatgtcctttcctggtttggatattagggtgatactggcttcatagaataatgtagggagaattccctctttatcttttggaatagtttcagtaagactgataccagttcttctttgaatgtctgatagaatgcagctgtgaatccatctggtcctggacttttttgttgttggcaattttttattgtttcaagctctctacttgttattggtctgttcagagtttctgtttcttcctatttaatctaggagggttgtatatttccaggaatttatccatctcctctagattttctagtttgtgcacataaaggtgtttatagtaaccttgaatgatcttttgtattttgtggtatcggttataatgactcctgtttcatttctagttgagcttatttggatcttctctctcttttcttggttaatctagttaatggtgaatcaattttatcttttcaaaaaaccagctttttgtttcatttatctttcacattgttttcttctttcaatttcatttagttctgctctaatctttgttatttcttttcttctgcttggtttgggtttggtttgttcctgtttctctagttccttgaggtgtgaccttagattgtctatttgtgttctttcagactttttaatgtaggcatttactgctatgaactttcctcttagctccacttttgctgtaatcccagaggttttgatatcactattatcgtttggttcaaagatttttaaatttccatcttgatttcattgttgacccaaagatcattctggagcagattatttcatttccgtgtgtttatatagttttgcgggttccttttggagttaatttccagtttattccactgtggtctgagaggatacttgatataattttgattttcttaaattaattgagacttgttttgtgacctatcatatgatctatcttggagaatgttaagccattttttaaatttaaaggtaatttatctggatcaaggtgatgccaagagctttgtgaagatctgaggtccacggaggttaaggatcagcaagagtgcttggtagtttccaacagcggtagagccttgacatttctgacgaaattgtgtttacttttgtttccctttttacaaatttacctgaggctctcatttgagaggacgtgggactgatgagccatcattctgaatgggcatatgccaaactggtaaagaaacaacaagctctttttagatccagatatctagatggaaactttcagtatagaagtcaaattctagaaagtgataaaggttagatacatattgattaatcatccacatgttaaagccacgagagcctttggatcatccagttagagcaccagtagagacctgatcatggcaggaaggagcacatgtcctgttgtgtaactaagggaagagggctcttgcttacttgatgacaaagttagttacatcaagccacttcatggcccaggatctggtctatttcacccatctgtgtgtcatatctgaggttgccaccctctatgaggattcccttgcaatggtgcacctggtaaggggatcagagacacataggaacattctaatcaagttgtaggtggaaacagagagcaccaaaggactaatgctgtctgctttctacacctacrttttcagggttgatactcaaaacacttaaccaccagcacagtattggcactgagcaatcagaatggacgtcagccataatgctggagcagggtctcagagacctcctgcttgtcatatttacccttttctggatcatggagcttttcaggtgatccctggggagggaggtattcaatgagcttggggctgcagcaattcagtttgccaattgagggttcagtattttaacaatgtggtgttattgttgcatattagctaaatatcagtgctttcctgatatgaaacttatgtcttgagttttgtgattctacttttaaaatatctctcaaaatcatctactttggcttatctctactgcaacactgtagtacagaacacccttttccactgcaacagcattctgactgctctctgcctcaaaccttttaaaaattgttcttaaatgaggctgggaaccttaacaaatccagtcactctactatcatgtgcctggggatagtgctgggtgtgtttacaatagagtgcttaatactgttggctcctggccaatcaaagatgagcatcaaaaccatgcatggtggaatgtatctttattcccagctactcaggaggctgaggcaggagaattacttgaggccaagagtttgaggctgtagtgtattatgtttgcacctgtgaataaccaccactctgcagcctgggaaacatagtgagacccccatcttttaggaaaaaaaaaagaaaaaaagatgagcattacacctagtagaaatatttttttctctctccactgcacattgggtgtctgcttcagaaacttcaacaatgtgtggtgcaagcagtggtaaatgaccaccagcatacatactagacctactgaagtagtttatagggggaatctcacggtggcagtagcaggaataggcacaggtttccccatcatgcaccacacctggagcaccactgtgaaatcctacagggccaatggtcagactctaagaaagggacctgaaccattgggctacagggcttttatgctacatgattaaagaagcatcaggtcagaggacaggatacaatagcaagatgttttagcctaggttacactccaaattgcatcagaaacaaggacgtgagtcaagttagtttttgagaaatgattccaaggaacaggagtgagggacaggaaaagtgaatagaaaaggagggagcatcaacccaagaatgtgctgtcgagctttttcaccacttgggcaattgggatttattttgctgggacactctgaggagtcatatagaatacactgcagaattgccagcctaagggatgtgctatggtctgaatgtttatgtctccccaaaattcaaatgttgaaacctaatcaccaatggcattaggacatgggaccattggagggtgattagttcataaaggcagacccctcatgaatgggattaatgcccttataaaagaggccccagagagctgccttgtccctcccaccctgtacggatacagcaagaaggtaccgtctatgaaccagggaatgggtcctcatcagacaccacatctaacttgatcttggatatcccagcctttacagctgtgagaaataattttctattctttataagctacccagtctgtgcttttttcttacagtagctctaaatgattaagacaggatagatgagggaaaagtgtatccrctggctgctgtctctcattagccgaagtttgaatggagggttaactcgctcatgctttcagatttgttcctacaccagaatggctggatgggttccatcaggagtctaacagcagtggcagagaagcctcagggcaaaaataatcctgtggtgcacttgaggcaaggtacagtcaggtcaagtctgtgtggagcaaaaactacagtttaaaaatgtggtctgaaaggatgtgaggtagggaacaaaaggtgtctgatacacagtgtgactcatggaaacttggctgcagccctttcttccaagcttagtgttagagattgagggagtgtaccacctctcccctggcatgatcagagagctggtgtccaagctttgtaattgcaggtacatggtgtcaagctagcagcagtgtaagttgttatatcaccattcacgtttgggaaaacagcagctcctctgttggcatgactgggaaactgtgttcacaccttgcaactgaccatgtgattaccttaaacactgtgctacagtggatttccaaggaattgtgcagaaagccaactctttttcagagggcagactgctgggaatccgtcttggccaagttaacctttatctctcacatagctttgcactctacaaaccaccagcaacatcattctttaaaaacagtagcaatagtagagaatagagcacaccaaaaatctggccatgttacccagttttctcagcaggcattttagttagggtggatcccttcatctaattcataaattcttagactctttccagaaggctaggaggatggaaggaaagaagaaaacatctcatgatagcaaaataggagaagggaacttttaatagaaatattgagaaaaaatgggaacttatttattatcacaagcgagtaatgtgagttgggttgtttttttctctgttcattccctgtcctctatctggaatgccttcttcctgttcaccccacaccactcgtccactttcttcctagggttattgctactcattttttgagacttgattcagatactgcctactctatttggactcttttatctgtgcacagaaaaatactttgtattttgaattgaaattattggcttcatttctttcttccttattagacattaagctcattcttgagagcacagaaaattgtgtcttttttggtttgattttaaattctcagcaccttatacagtgcatgacttatagtaaactttcaatacatatagaaattaaatgggtaataatagaatataagggaattggttgggcacagtggctcacacttgtaattctaacacttgaggaggccgaggtaggtggttcgctttagctcaggagttcgagaccaggctctacaaaatatacaaaaattagccaggcatggtggtgcacgcctgtagtcccagatgctcgggaggctgaggtgggaagatcacttgagcccaggaggttgaggctgctgccgtgagccaagatcataccactacactccagcctgggtgacagagaccctgtctcaaaaaaaaaaaaaaaaaatagaggttaaagctgtggaaacttttgtttcccctcattcccctcatcctccaaatttcatttgatccaattttttattaaattcttttttattatttactttcctatgactgtacatattccttccagctaatttacataatgtgcactttgttttctgaattttttttttaaagggacaagctcttactctgtcacccaggcttgaatgcagtggcatgatctcagctcattgcagcctcagactcctgggctcaagtgatcttcctgcctcagcctcctgagtaactgggactacaggaacttgccaccatgcccagctaatttttttgttttttattttttgtagaatgttgtcccggctgggacatttcctttctttaataactttctttttcttttttttttgcttctggtccttgattcagggaacattatttttcatgatatgaacaatcgtggtttttttttccagtagctaacttctccatgtacttactactaattcagttccagtctttcaaagggaaatattgaattcttcttgataaaaaaatgggatatgaagttccattttttccttagagatgtctctcttgataacttcatcctcttccttttgtcagaactcattgctttaagcccacttcaccttcctttagcacccctccctgcccctggcccagtaattccagtgcttctttcatctgagaggctctcctcacctgcctggcgatccttgctgcttgttttcatttaggagtgaggcaggaacgctggcagacttcactgtagagtgatgagcaggaacccctgacattccactgggaagcctgtcccccagatgttgtatctgcaggtgtgtttcctccagtatcctgcttggagggagggctgtgagtcaggggccaaaggaggggaagtgctgaactgtggatatcttggttcagcactcagactctcatttaactagttttcagcacaactgctcctcccaaccctcagctgtgctttgtacccttttagtgaggaagaggagaagggctgtgctatctggggaagatgatctagggatctcactacaccttttcttttaaaaaaattcttgcaccatggcctgtccttcacagcctccacataatgctttcagtctctaaggcttcttgtggtttttgttggctcccagccaccccaagccatgaggttttagtgctatcaacaatccctctggctttttagacttctttaaactgccagaatccctttcatttctttgtaatttatctaactattttgcagaaaagagatgaattatagtggccattttaaaaacccaagagtattctggcctttttaaaaaaaagatttgagaaagaaaaaagaaaaagaaaggaggggatacattgacatatcatttacactttagagcatatatattacaaacaaatgccacattttctacagtcatgtcttacgactacaagcagttttctcaagcctaaattaagggtaacattgtagatataactatcttaaaaagactatttgacaagaagaaagtcctcaatttctttgtaaatggcaagaaaatgtagcacgggaaatttgtcattttttgatagagtaaaatcaagttttaattcttatttattaaatgatgattacttagctggcagtttctttgtttattatgcatgtctagcttcttattggcaaaaaaaaagaaatttatagtactagcctgaaaaaacaaactatgcttttggcccaagtgagaagctgataccctggttaaagaaaaatcacgttttcttgttgtttcatattttccttgatcaaagctgggacttatattgtatctgtattcactttccttagtaacctactcatctgtctgcttttatcttacacaattttattggcattgttaacttaagaatcatgagatttataaatttggaaacgagactctttctttttttgaattattttaaatttttgtgggtacatagcaggtatatatatttatgagatattttcacacggcatacaatgcctaataatcacatcagggtaaatggagtatccttcacctcacaaatttatcctttctttgtgttacagacaatccaattatactcttttagtgtttttaaatgtacaataaattattgactgtagtcaccttgttgtgttgtcaaatactagatcttattcattctatctaactatatttttgtatccattaattatccccacttccctcctgccccaccattccctgccacctttcccagcttctggtaaccatctctatttccatgaggtcaattgttttaatttttagttcccacaaataagtgagaatatgcaaagtttgtctttctgtgcatggcttatttcatttaacataatgtcctccagtttcatcaaagttgttgcaaatgacggaatctcatggctgaatagtactccattgtgtatatgtaccactttttctttatccattcatctgttgatggacacttaggttgcttccaaatcttgattattacgaacagtgctgccacaaacgtgggagtgcagataccctttgatattccgatttcctttcttttgcatttatacccagcagtgggattgctgtatcatacggtagctatatttttagttttttgagaaacctccaaactgttctccatagtggctgtactagtttacattcccaccaacagtgtactagggttcccttttctccacatcctgccagcattcatttttgcctgtcttttggataaaggccattttaactggggtaagatgatatcttattatagttttgatttgcatttctctgatgatcagagatgttgaacaccttttcgtatgcctgtttgacatgtgtatgtctccttttgagaaaagtctattcagatcttttgcctatttttaaatcagattagaattttttcctgtagaattgtttgacctccttatatagtctggttattaagcccttgttggatagatagtttgcaaatattttctcccattctgtgggttgtctcttcactttgttgattgtttcctttgctatgtagaagctttttaagttgatgtgatcccatttgtccatttttgcttgggttgcaaaatgtgcttgtgaggtattactcaagaaatctttgtccagactgatatcctggaaagtttacccaatttttttttagtagtttcgtagtttgaggtcttagatttaagtatttaatccattttgatttgatgtttgtatatggtgagagataggggtctagttttattcttctatacatggatatccagttttcccagtgccatttattgaagagactgttctttccccagcatatgttcttggcacctttgttgaaaatgagttcattgtataagtatggatttgtttctgagttctctgacctcctttggtctaggcgtctgtttttatgccagtacgatgcagtttgggtgactatcactctgcaatatactttgaagtcaggtaatgtaattcctccagttttgttctttttgctcaggatgactggctattctggatctttcgtggtttcatatatatatttaggattattttttctatttctatgaagaacagtgactgctattttgatatggattgcaatgaatctgtatatttcttataaagggttacagtcttcaagctggccattctgacaggcatttcgaggaagagaggagcaagacaggaatttaagctgaactgtttggccaagtatacatattcaggtatagatatgtaacaagttataggaagagctacgaacattcatgaagtgggttctaacatgcgtattgaacaaacatgcacgttacatatgatccatgttcactttggggtggagacttaacatataaatgcattacaattaggcccttattatacgtcagaaagtgaagcagggacttgaaggcattcacgtgtacagcctctgtaaacaggccagaaccacatcgtggtcagtagtcttatgaggagaaagttactgaaatcagtctcttgtccagtcaaagctctagttacggcgtaggggacaggaagatcagttattcagcatctgttggtgaacgggccgtaattcttttaaaattgcttatcttgaggacagtgtttgtttaactgttagagaaaaaagaaaaaccttgtggcrgttagaacatagtttattctttaagtagaggggtttgtgacttcaccattgcctggcatggccctaggttttctttatagtttggtatcttattgccacaaagagtctgttctgtcagtcttatgatctgtattttaacattaatgctggtcagttatwgtgtctaaaccacaaaaggaaaggggtataatgaggtatgtctgacctcccatcccatcatggccaagaacttagtttttaaggtttctttggggtccccttgcccaaaacgggtctgttcagtcagttgtagggagtgcttagaattatatatttggtttacagcatctaatttttcctttactgtcgtgatagtaggatttcatgataaaatcctgtgttcaatcttctgtatttatccagaagccaaatatgaaattttcactatctaaaattttccttttttatcatgaaggtttgactgatattacaaaggatccagactttaatgaaatctatgatgaagacgtgaatgaagatccaacatatgatcccaacagccctgaagaaacagctgtatttatgaaatatgctgaaaatattatgctaaagttaacattcagtaccacacaaattcaacagtatgaaaatgtctttatatttgaaacaggctattggcttactaatgctataaaatataatcaggattatcttgatatctgtacctaccagagactacagcaaagattatatcttcaaaaaaagattattcaaaaacactttgagaagaaaaaagatatcagaagagggataggatacctaaagttaatatgttttctgattccatttctactgagtttaaagaagaaaatgaaagttccatatttaagtagtctgcttcagcctttttcaggtaagagtatcaccaaaaatcaaatataaaatataggtatatattaaatatatgtttaaatgcaattttgtttctagtatatgggtgcaggcagtaacctagctataacctgttagagaaaacaaacaatttaatgtctctaatgtaattaaaaagactcagtgtatgtatatagtactttgtatatatttataccaattataagggctactgaaagatttaaagtaagttaaaataagttctgtatgaatagggaaatatgccatatccatgatgggaaaacactgtgaatgtatcatatctcattcaaattactctataaattcagtgtacttctattcaaaatcctgatgatatttttcattgaagtatacacacttactctaaaattaatatagagcagcaaggggttaataatggtctttcatttctgaaaaatagatggaaacatattaaaactacagtaattaaatgagggcagtattggcactttaataaacaaatagagcaatgtaagagaatagagaactgaaacaggccatgattaatggaatttgatgggacttcagtataaactcttcattcaacactgattagcacacaatttatacattttcattgctttccaagcatgtaggcttattataatgggctttctattcagatggcaaattttcagcagaaattttgcaaatcctttagtgaaagtttgtatcatgagaattcaggtgctgtgttttagtgaaagtttgtatcatgagaattcagtatctgtgaactattagaaatggaattatgacagggcatggctcttgggtggtggggagcatgtatagaagtaggagggacttgcttaaagagaacgttarctatatctgcaatatcttattacttaaactatgggaagcaaatatgactaacgttaatagttaattctaggtgttgagatcagggtgtatagtgtatattattatttgtacttttctttaccttttatatttctcaaaatacattatgtcccttatgttgattaaaccatattctactaaccagtcaaaatattgaaaaaacctagtctttgctggaatttgagaaaagaaattttttttgaggcagagtcttgctctgtcacacaggctggagtgcagtggcacgatctcgactcactgcaacctccacctcccgggttcaagcgattctcctgtctcagcctcccaagtagctgggattacagccacctgccaccatgcccagctaatttttctgtttttagtagagacaaggtttcactatgttggccaagctggtctcggactcctgacctcaggtgatccacccgcctcggcctcccagagtgctgggattacaggcatgagccgccgcgcccgggagagaaaattatttttaaaaataagttatctgtgtagtttcattactttccagaaatatgggatggttatttttatatgtgagatatactcatctgcttctttataatgtctccttttacctaaactagctgagataagtttttgtatattaaacaaagattctcttaggcacagagtttctggtcctttcttataattgggagtaagatactaatcttgagctcacttacaataaatcaagaactggaacaatgttttgagcatacttttgaaatgtctgtacaataaaactacagaaagtgctcaaaatataaatatattgtatatatacatacatatatatgtatatatttgagatatatatatatataatatataaacagtaattaactgagggcagtattggcactgtaatatatgtatttgagacagggtgtcactctgtcacccagccggagtggagtggcatgatctcagctcactgcaggttttacctcctgggctcaagcgatactctcacctcagcctcccaagtaactgggattacatgcatgtgccaccacatccagctagtttttgtgtttttagtagagatggggtttcaccatgttgcccagactggtcttgaacttctaggctcaagcgatccgcccccctcagcctctcaaaatgctgggattataggcatgaggcactgtgcatgctcaaaaatatattttaatgttaaactatttatatacattaacagcataaataattttatgcactataattgccaagattttaatttcatctggaattttctcactttgtttacatgaatgagaagctagatctcttaaaatatgactttatgtgctgttcactttttaaataaaaatttgttttcatttttggagatgacaaggtcaagacagagcgagaattgcctccatttatttatggaagagattttaaatgccagaattttcactacaaagagaatcaatattttcatgttcatggaggaattgaatttgatatcagcaccccttcaattgagaatgccttggaagattttcaggtttaaatgatcattccttagacaatttatcatttcacaactcttttatcctattctccaaccaaaaagagcctctgttggtacaggcactcgacagctctccaaatgattattctcacaactcaataattttttcatacattattttaacatcaatgaattaagtgcagatatatgtaaggtactgtgttggatatctgagataaaattataaataagctaggtacatctatcaccctcacagaatttaaagacttctaatggactatatttgtcccagaacaggtaaccaaagagtgcagtagaaatctctggacactcagtacacattcttccattttcctcaaagaatcaggattagaacagagatcctttaaaattttggaacagtaattcttcacctggaatttagtataaaaattctacatttcaattgttattgcttttctaccttctgtatactatgtgtctttccttttgtattttttcctcattctcaaagtaaggattagatatattcagctgctatccgggtcttctggaatagtaaatttaaaatttgtcatttacatgtatactctttcatacaaagaattcttataattgtttagatgtgtctaaggatatgtctttagtaacataactcatattttagaaaaatttagaaaaaatacgagattgtgctgctaatacatttatagaagattcaggatataaagaatattactcaataccagtcatggaatttcatggaaaaaggtacggagctttcactaattactgacattaactacaattttttgcacgttagtagagaacaaagaaaatgacaaaatgcaaaggttaatgtaaacctttacaatggcgattccacaataataaccaccatgaatgacttatggactcaacaaaatattaaatgttatagttattacttcatgtatttgatatagtctgtgtaacaatccttagagcttgtaattagttcttataattaacagagtggttaaataggggtagagatggggatcaaatcccagcctatttgtcttttatgtgttgtggttcttggatttttaaatattggacactgaaatttggaaatatgggaagtagagctcagaggaaacattttaattagaggcaaagatttaaaaacaaataaggaagttttgcttgttggttcgtttgtttgcttttaaggcatgcaagcagttgggaggataggaccaagtctggaactttggagaatagtaactgaggtgggaggattgcttgagcctaggagttcgagaccagactgggcaccagagtaagaccctatctttgtttttgtttgtttgtttatgagacagagtcttgctctgtcacccaggctggagtgcagtggtgcaatcttggctcactgcaacctacacctcctaggttcaagtgattcccctgcctcagcctcctgagtagctaggattacaggcatgcgccaccatgcctggctaatttttgtatttttagtagagaagaggttttgccatgttggtcaggctggtctcgaactcctgacctcaagtgatctgcccacgtcagcctcccaaagtgctgggattacgggcatgagccaccatgcctgtccataagaccctatctctacaaaaaatttaaaagctagccaggctaggtggcacatgcctgtagtcacacctacccaggaggctgaggtgggaggatcacttgagcctgagaggtcgaggctgaagtgacccgtgattgcgccactgcactccagccttggcaacagagtaagaccttgtctcaagaaaaaagaatactgtatttacagcaataaatagttgcatttggaggagaaacccaggtaatattaagaggtgtcccactgacagaggtaggtcagcagctgaagtattcaccgctgaaatccgggcatgggaagggtacctcatggggggaaggggaggaaggtcgccgttttccctcacctgtgatgataagcaaacccagggaacagagttactcaaaattttatcaattttccattccagaatgatagggatcagggctgtttcaagccccacctatgttccagggacctggtaggaggggggtttctctagtccactgctgcagtgagtaaaagccaaggagccattgcccaaagcatcattccatattacattcaaggtaaactctcgaggagccagatatagacataattagcttaaaagaataagaggtaggtaagcagacagttagatgacatagaacttcagccagagttaggccttccaggagcttttagacattgccccagatcactgacatggaaaggacagagtcaatacaatatgaagaaggtatttttatataaagacttgattaataacagttgataactatcttattaatatacttacagttgactacaatttaaactaccattttgtatttaattgttacagaaaaataaaagttttgccagcatagaaagagaagtagcaaatcacttcaaagttagagaaacatcttttttttctttattttttatagctactatgtgatctattttgaactagaaactttctatcagcaactatataagacacagtggtggggagccataaatgaaatagtgaacaatctgagactgaaaagacttccactgacagatgctcaattacatgaacaatttaagaaaaagcttggtttcaaaagagctatgaaatgcaaggtatttcagtgactaccacataatttagtatatgaagttatgtattattgataagtatgtgtctcaaacagatgtttatcctagggataataataggttaaagtcttcaacatgaaataaaatgccacattttagtagctgaaaggctatacaattctggattataaatttctggcagagtacctgttaatgcactggattgtgattaatctcaataacggcttatacgtattgattgcttattttgtatgttaggcaatattataaatcaatgaactcttttaaggtacgactagttctattattatcattcctgttatacaaatgagaaatttgaggtgtagagagggatctttcacaaatcatatagtaaatggcagagccaggcttcagtcctgggaactaaaacctaaagagcagacctagcatcatcaaatctccacatctgtttcaacaagccttgaagtacagcttctggaactgagcaaagaagctcaccagcttcaaaggttagactggtatttactttccatttatttgttttcacgtccacaaattaaaacctcaaaaatttgttagttgaatttttaaatattagtcagaatgtctaaagagggtgacatttttacctttggatgacaaactgtatttctacagctatatatttcaaatttctagacttctgaattaggtttttcttaaatcagagaaggaacccaatgatctccatttgcttttaaaatattttagaaaaaaattaataataaaaaattccccaaaatattttttaaattcttaatatttgcttatagctctaactactttaatcattatccagtaagaaactttccatgcatggatcttgtgaaaattctacttaattttaacagcattcatgtgattctgttaatacacttcatgtatttttttccttaaaccaaactttaggtgcattttgataaactgattctggccttcttaattttagagtattccatttggtatgaagtccgctgttgaaagagggttgtctgcagttttccacacatttagccgtaaaacctcaagctcaacaatcaatgtttcagatgaagcaggttatactatttttcatcatgctgccctgcacaacagagtttctattatatgtcaactgtgcaatgctaacttcaaggtcaaccagaggcgctttgttacgttcagccaaggtaccataaagttttttaacctaaaatgttgttattttatttacccttactcagcattaggaatgcacgttgattttagagcaggttaaaatttggtattaactagagcaaagttgaggtttttgtttcatttatctaagaaaggcttcttttagttttctaagtatcacttatagctagcttatatggttttatatttgctcattgtgtctccttcatttgagtataagctctataagagggcaaagatttagcctactttatttgccgtggtatactaatgtccagatgaaagtgtggcttaatggttgctcagaaaatatttgttgagttaatgcatggatgggtgaaggcaggatatcatttgataagcactggcaaaattaatatacactgatatactatagaaattcagagaacagcaatagatatgactgtcaggtcccagtagaacaatcattctttattccaggatcctcaaacagggaatagtttctttatattacatatatttaaattacatttaataacaaaaaatttctttatcataataatgtttagcattaatagcccctttaaggttaacctcatttaaactttaaaagctatttttgtgattattaaatatgcatggatattttataatcattgaaataaatttagctagaataaaaacagagttgaaaatgaaattggtrgccctccataactggaaaggaaaatatagataaattgtcaggggcaggtgtagtggctcactactgtcttgccaacactttgggaggctgaggctggaggatcactttagactaggagttcaagatgagcccgggcagcataacgagaccccctgcccataaaattaaaaaaaaaaaaaacttagccaggcttggtggtacacgcctgtagtcctagctactctgagaggctgaagcaggaagattgcttgagcccaggagtttgaggttacacatatatatgtacatatatatgtaaattgtcaggaatggccaatgcaacaatattggcaataagaagtggtgattttatatttaatgaagtcagctatcttaataagctatgttaaatttttacagacgccaaaacaaaatgttttgctttaaccgtattgaatatccataaattctgtactctatcagtatgattaaaatgttttgatattcagattcttctgttactgaaaatattcaatacataatacataatgaacctaattaaaataagacacaattcaatcacatttaaatgcaataggtaacactatttaaagatgtattactttaagccttttttagtgtggaaaaagtctttgataaattaaaagtttctcatgcgccctctgactgcttgagtttccatttgctgagaattaggtagattttgaagtgtggaaaacatagtactctacttccaatattattgcttaaccaacacaaaattgtcccacctgtgagttttaagcagccatttggggggcagagtttccaggtctgcttttaatgcgttgtcaggtgcatatgacatgcctggatgacttgaccaaaagttattctcaacactgttcgatgtaatcttgccagatacatctacrtagtcattttgttcttattcatatgagtcttcttgaacaacttaggaaactgctgtatattaatgatcatacttctatgtgcattcccttttaaaacagagtcatccaaagtagaggtaaaaaaggaaagaaatggtaagacataaataaagtatttggtgcatttaaaaaggctattgcatatattagaacttttcttatagtatataatctctaaaatactgttgcatcagaatgttgcataatgatgttttgtattcattttgaagcataaattactttctactcatagttatttattggtattcctcttcagtttggggagttttctctttttttcctgtggaatttgctgtcacctttattttttataaattcaggcccacaagtggtttctacaacttaaaaaaaaaaaagttattataatataaattagataggctgccatctagtggcagtaacaatctgtgaggtctgaggaatgagtcgtttttgactgaggtagtagacttaacctcaatgttggatatggagaaaaacaaaatgttaagaggttatactttctttgtctatatttaagaggctataccttcatactctgtataagagaattcagaaaggcttttgttttaaagaaattacgtacaacgaactgaattgtcaagggggaggggatagttactcaaattggccatcttccgttagaggaggagcacagcaaacctgagatgacctcagagagggagcccgacctcattcttcctcctccaatctcctgccagagctatccattggcagatactgacaaggagccagaggacacaggttgctttttctgcaggtgcaggagagccagggtggtaaaggaggtgagtggaactggagcgggaaaaaaggaagcttacctgtcccatccgccctgtagaaatttccagttgagtaacaatagtgtgcctcctacattattgctctctctttttcttttctaagtatcacttatggctaccttatataaatttatttagttagttagtctccctcacttgaatataaagctccataaaggacaaggatttggtctgttttgttagccacagtttcctaacacccagaaaaacgcttggccttcataggtgctcaggaaatttttcttgaggggtgtacattttattggaaaccttaaatactcttcaaacagaacatgtcttcaattaaggctctaaggtattctacacagaaaaccaaagtttttcagattagaggcaaggagagggacagtatagaggacaagtgcttagtttgccacaaggacccctcatgattaatgctcctcagccagcttatcagcttccttctcctttttagggttttttctcctatcttagcatattcattatatttctttttacatttttattagtgattgccctagagtttaccacattcatttacaattattccaagtctactttcagataacactaagccacttcacctgtagtgtaagtaccttataataacaacatattcctaagtcttcccacctatcattcatttactcatttcacttgtgcataagcatatatatgtcattcatttcataaatgtcattcatttcacttatgcataagcacatataagtatctatatattcaaaccctttgttgataatgttattatttatttacttattttgagatggaatcttgctctgctgccgaggctggagtgcagtggtgagattttggctcactgcaacttccgcctcccggcccctgggttcaagcgattctcccacctcagcctcccatgtagctgggattacagatgtgcaccactacaccgtatatgttttgtatttttagtagagacagggtttcaccatgttggccaggctggtctcgaactcctaacctcaagtgatccacccacctcggcctcccaaagtgctgagattacaggcgtgagccactgcaccgggcctgataatgttattttgaacaaactgttctctgttagctcagttaagacaaagaaacattttacttgaccttcttttttttttttttattctctgatgctcgtccttcctttatgttatgtaagtttctaacctatatcatttttcttctctttggacaacttcttttaacatgccttgcagggcaggtctactggtggcaaactccctcaatttttgtttgagaaagtctttattcctcattcacttttgaaggataatcttacaggttacagaattctagattagtggttccattatctcaacactttattttcctccgcacacttcctgcttgcatagtttctgaggagaacttgggtataattcttatttttgcttctctattagtaatgtgttttcctctggcttcttttaggattgttttctttttaaaataatttttaatttctgtgtgtacatagtaggcatatatacttggagtacatgagattttttgatacaggcatgcaatgcataataatcacatcagagtagagtatccatcacctcaagcatttatcctttatttgtgttacatataatccagttatactcttttagttatgttaaaatatacaattaattttttttactatagtcaccttgttgcgctagcaaatactaggtcttatctattctttctattttgtacccattaactatccccacttccccccactacccttcccagcctctggtaaccatcattatactctgtatctccatgagttcaattgttttaatttttagctcccacaaataagtgagaacaggcaaagtttgtctttctttgcctgacttatttcacttaacataatgacctccaattccatccatgttgttgcaaatgataggatctcattctttttcatggctgaatactactccattgtgtatccatctgaatggataaattttctctatccactcatctattgatggacacttaggttgcttccaaatctttgttattgtgaatagtgctgcagtaaataggattattttctttatctttgtttttctgtaatttgaaaatgatatgcctcggtgtagttttttgtttgctttgacatttatttggcttggtgttctctgagcttaccaaatctgtggtttgatatgtcacattaatgtggaaaaattatcaatcattattgttttaaatatttcttcttttcctttctctctttcttctctttctgttcttttttccccctagactttttaatttatttttatttttatttttgagacagggtatttattgcccaggctggagtgcagtggcatgatcttagcttactccagcttctacctcctgcactcaagtgaccctctcacctcagcctccctagtagctgggactacaggcccatgccaccatggctggctaattttgtttatttttttgtagagatgaggtctcactatgttgcccaggctggtttcagactcttgggctcaaggaatcctcccaccttggcttcccaaagtgctgggattacaggagtgagccactgtgccttggcctggaggtttctactgatatatcttcaggattagagatttcttcctctgctgcgtctaatctctttataagctcattaatggcattcttcatttcttttacagtgttttttatctgtagcatgtcattttggttctttcttaggatttccatctctctgtttatattgcccatctgttcttgcaggctactttatccattagaacccttagcatattaatcatagttttaaattccctgtctgatcattccaacatccctgccatgtctggttccgatgcttgctctgtctctttaaactgtgttttttgctttttaaatatgccttctaaatttttcttgatagctgaacttgatgtattgggtaaaagaaactatattaaataggcctttaataatgtgatggtaaggtatggggggagaagcattctatcatcctatgattatatctcagtctcttggtgagcctgcgtccctgtactttgaacttcaccagtgcttctcagtcctctccccctgtcccttaggccagccaggatggttagaggggactggagttgggcatttcccttgcctaggtaggttaggttctgataaaaccccagcaggttagggtctgataaaagcccaataggttaggctctggtaaagtagtttctcttgagagcaggtcttgttaagaacagaatgccctggagtatttcaaaatggttccttttctccctccccctgctggaagtatgaggggatttttcttcaatattcactgtgaggacttgataaaactcctagaggtaaaacacatgaaagcatggggccccactatgatggatccttctagagtttttaactctcatacttgtccacattgagcttctagcaattgtgaattaatgttaaggttttcttactccagtaatgattccttaggaagttcctgcttgtgagtttctgctctactgagttatgattctctgaatccatttgtctctccaattttgagggtatcagtttgcccattacctcacttctctgacaaacttaagggctgttgatttctttagggttggttcagctttttacttgttgttaggatgaaatggtaacttctaagctccttaaatgccggaccagaaactggaagactaaacaataattttaaataaatagatttgggtcagattttatagactattaaggctataatatcaagctcccactatgaaggcaggtaggaggacactggaagtttctgatgggagagatgtaatgaaaacagtggttcactgaggaaatatcttttaaactgagaaatgattaggagttagctagatcggtaagggaggaattgtttgggagaaggaaggtgtcagagagcaggaatagtccagggtggacagataattcatcattcaaatcaaggagacttgaaagtgaaagtgcactattaataattatgctagtgcaacagacattgaccagtactttcctgggtaacctggggcgtgtgattatgctacatttggggagctacaagaaagccagaatgaggagaacaaggtatgaatggttttattgggaggtagatgaagaaggtagttgtagctggtgcttcaagttaagttggagccagtggatcctgtcactgttcctcataatcagatggccttgagaagccattgaacaaggagatgaaaagatcagatttatgttttgaaaaactgggttggataagggcaaaacaagatggggatagcagttgggagatgattatggcttggattaggatggtggtggtggtagagatgggttctagagatttttagacttggtgatgggctggttatggagaaggaaataagagggaggtgccaaagagtcttccagatttgtggtctgtacaactggctggatcatcatatctctcactgatttaggaagcaataaaagagaaccaggtttggagggaaggatagtagttcaattttgaatacattaagtttgaggggatgtgtgaagatgctttacaagatgtcaaagatatagatctgcaaatcagaagaaatcagatctagagacataatccttggagtcatcaagttgtatatggtaagcaaagccactaagaagagaaaaaggcccaagattgagccttaaagttcatttggatattaggacaatgagaaggttccaaaggagactgccaaggtgtaaccagtagggttggacaaaaattgggagtgtgatatcacaaaagccaagggaagaaattattttaaataggaagaagtggtcaatggtgtaaaatactactgagaaataagtaagatgagaattgaaaaatgacagttggactttagtgagaattcactcactatcatgagaacagcataggggaactgccctcatgatccagttacctctctccctcaacacttggggattacaattcgagatgagatttgggtggggacacagagccaaaccatatcaggtagtaaaggtatgaattgctattatgctttgggagaataatttggcaatatatattaccagtaataatgatgctgttgataattatacagttttacccagtaactctcattattgggaatttttttttttttgagatggagtctcgctctattgcccaggctggagtgcagtggcatgatctctgctcactacaacctccgcctcccaggctcaagcgattctcctgcctcagccttccaaatagttaggactacaggcacgcaccaccatgaccagttaaattttttttgtatttttagtagaccccagtttcaccatgttggccaggctggtctcaaactcgtgacctcaggtgatccacccacctcagcttcccaaagtgctgggattacaggcatgagccactgcgcccagcccatttttgggactctacccaaataataaatatctatatacaatggaaaaaataaaaraaaaatgcccattggatttagtgacattgaggcctttgttaacatatatatatatatatatatatatatatatatatatatatatatatatatataattttaatttcaaaggatcttatcttcaactaaaaaacatgagtaaaatggaaaataaacaagaaatagtttaccataagactattttacacattgacttaaattttcaaatacttaacattttattttatttttttaaatatttaatattttaaatgttactcatttttctttgcttataaaaaaatatggatttttaaaaatttttgttttttgtttccaagtatggatttttagtggttgggatttttaatcctgagttaaataaaggaatatagggttgtctaaatttttttttaatgcttactttggagattttatatcatacaatactaagctctgtggctggatatcaataaggcatttaggttttttttaggaatggtagtgctgtgatcactgaagtaattgtccatccattctaggtccaacacctctacaccttgctgcacaggcttgctcattagaaacaacagtttgtctactgtgttccaaagctgattacacgctttctgaaaaaagaggctggatgccgattcactttgccgctttctatgacaacgtttgcatcattattgctctctgtaggaaggatcctagtttgctagaagctgaggcaacagctgagtaagtcattaagcatttatatcaggttgaggttgatgtctaggcaataataaaaaaaaagaagaaagaaaattaaatagaatataaatttctgcttttcatggcttgccacacacactgccactaaaaggtgataggtgtgggtgatctgaaaggtatgtaaggcttactctgctatcctttctactcactgtctcgtcctaaccacttatcattagaatttataaaggcgagagcttctattaacctatgcatgttttctggaagaataaggactaatccccagggagtttttcctaaccttgttccagtagtatggttctgcagattaacttttcatgttaaatgctttgcttagtgccctggaagaagcctgagactagggaggagagggttgctccaaactggatcctacacaaccaggaggcagccctaggacttcagatcaaagcggatggactttggattacaggagaaatatttagtggtatctggaaaagaaatacattaaaaagaataaaataactttgaaattaaaaaatcccaacaatcttttgtttcacattttagctgcggatcagyatttagggtaaaggtgtaacttctcctgaaggtacatccttggctagaaatctaaaggccaggtcattactttggatctctgaacctgatttaggcatagtttcattcaagtttttctaggtctttgagtaacctttccactattattcagtggtctagggctagtataatgatggcttgacagtatgagggacaccagcttcctcttgttgctcttaacatgtggaagccaccagaggaagctggtgtccctcagatggcaactcctgctttcaccatcatgtctagccatgagaagaaagaagaggccaggtgcggtggctcaaacctgtaattccagcactttgggaggccaaggcaggcagatcacttgaggtcaggagttcgagaccagcctgggcaaaaccccgtctctactaaaaatacaaaaattaacgggtatggtggtccatgcctgtaatactagctactcaagaggctgaggcatgagaatcacttgaaccgagaggcagagcctgcaatgagctgaggtcacaccactgcactacagcctgggtgacagagtgagactccatctcaacaacaacaacaacaacaacaacaacaaaagaagctgggaaatgtaatattgcactggatagccaaacaaaatatctttactatctaaaaatcagataatgggttttcgagcaaaactgttagtttctgccacaatgaggaagctgggatttgaaaactggacatgaagtaatgggtgtaattaattcctgagcctcagttacatgatttgcaaaatggctgatgatatttgccttgctttttccttcacttacggagtagttgtaaggcttagataggatagtgtattgtaagaactttgtgcgttatcatcctccaaacaaattataaggcatgataattaagttggggaggtgggtagggtcccatagtaaggatggcatggcaaaggaggcaaatccatttacatgtagaatacggaagatgagaattcctaagaatagaaggtggtggtgtaagtcagactacctccaattgcagcttgaatagttttacaaaaagtaaatttgacactctatgcgtgtttaattgttatgtttcttaatttttaggaatcagtgcactccactgttacttgctgccacttcaggagcactggacactattcaatacctgttttctatcggtgctaactggagaaaaacagatattaaaggaaataatataatccatttatcagtgttaacctttcatacagaggttctcaaatatataataaaattaaatattcctgaactcccagtgtggaaaactttggtaggtgagtataatctctttataaatacatgttctgattattattcagtttagttattgatactctgaaagagagaaaataaaataatacatgcattatattttaaatatttaaaaatcatgaaataaacattttattaagaccagaaataaaaatatgaataataaagagctgcatttttgtgtgtgcaaacatagttttatttccatgttaaaatcaaagatctgtgacccagactatattttacacaattatatttatttttattttccaactttctccagaagttcaaacatcctctccttcatcaaaaaaaaaaaaaaaaaaaaaaaggaaagaggaaattttaagtgaaaaatattccctccaacttattccttgcctcctaattttagagacaaatttagcaaaatcttttgttrtattttgatgaatgttttgtgaagaattctgctggagtttttattttctttcttttttttttttttcaaatttgcattcagtctagccaaaataagggtaagggtcactaggccaattatatggacatgyctaattttactccctttcaaggccctcactaaaattacatggagattaaacattattaataccaccagcagaagacaagcattcaagggaaaacaagaaaggatacaacagcaataaactattggaagatggaaacagataggcaagacttaggacttagccagccagagaaaatcattccaagccaacagtgggaaagctgagaaccccttggactcataccataaatcctcaaaaggcttgagaactgacagtgcccgttaggagtgctctcctcaaagcctaactaggaaagacctaaagatgccaaggctasaattctccttmagaaatagaaaggagagggacccgggaaactgggagccttacccaagcgtaaagcatagggaatttcaaggaagacagcaaggggaagttccagaatggaactgtgcatccagtctagaggaaaaaaatgggaggaattatcagtaggtacaaggaaaactaagcagatgaaatacagcagtcttcccttctcagcagtttatctttctgtggttttggttacctgcagtacagtacaaaaagatattttgagagagaggcatagagcacattcacataacttctattattatatattgttgtaatctattattagttattgttaagctattactatgcctacagactttattatagatatgtatgttcagacagtctggtttgacttaaggtttttgattttacaattgtgcaaaagtgatacacattcggaagaaactgtacttacagtcctcatacaaccatttctgtttttcacttttagtacagtattcaataaattacatgagttattaaacactctattataaaatgggctttgtgttagatcattttgccaaactgtgggctaatgtagttattccaagcacatttaagttaagctaggctaagctatgctgtttggcagattaggtttacaaatgcattttcaatttacaatatttcaacttacaatgggtttatcaggaaataaccaaatygtaagttgagaagcatctgtctaggaaaaaaaatagtatatacagggttcagtactatcctccgtttcaggcatccactgggggttttggaatgtatcctctgcagataaggggagactattgtaaaataaggaaattattaggccaaggcgggcagatcacgaggtcaagagatagagaccatcctggccaacatggtgaaaacctgtctctactaaaaatacaaaaatcagctgggcgtggtggcacgtgcctgtagtcctagctcctsgggaggctgaggcaggagaatcacttgaacctgggaggcaaagttgcagtgaaccgagatcgtgccactacagtccatcctgtgacagagcgagacttcgtctcaaaataaataaataaataaataaataaggaaattacctgtttaaaaaaaaagagacacgaccatagtacattacagtgctcagctgtgaataataattgtatagacatcatcatgtatttaactaaaagctataaatatggagaaagggaagtaagaggaaagagcaacgttgaaagagttaatttcccatttttcataacatgaagtcaatgaagtctaaatcaatgtagcaaaacacagcagtgtatataaatatgtagaaataaggagatttataaatcatagaaggttatagggaagagtccaaaccgattgtatatggagtgatgaacacagaaaagtggggagggtggggcccaggaaccactaggttttgttataggccatttaataacatttaactctgaatcatgcacatgcattactttgataaaaataaaaaactaaagccaaaaaagagaaatgaattggagaatgagaatgatttttttccaacaactcattttaggatgggataaaatatgtttaagattttcaaccccattctactgattcaagaagtctggctcaatacctgacgttggaatttactaggtactgggaacatatcccagatactggatatgagccccaagagatattggaaagtgttttcagtgtttatttgcatgcatttgtatcatttcgttgtcttgttaggaggaagtgagaggaccatcctgttacttttactaaactaaatcattgtaaaaacctaccttaatagtaggaagctctgccccctaacaggaatggcctaaaagcgcataaaaattcaccagggctgctgcttcctacagccattgtgggggaagtcctgacaatgacacaaacagaacaaacaacagtgagcatctggctactgctgttttgccttgggccctgcaatagctctccctcctcacactgcccatttccactacgcataaaagaaaaatcagtttattagaggtctcaggattagttcttggagtagaagctgaattttaaaagaggatgtcacggaatgatatagccaagctagattcaggacagatttggtaatagagtggctggctaaagagatgaggaaaagatagtctgtgtgttttttcctgtgtgtatatttgtaatatcctctgtctgtagtacaagttcatccaagattttatttaaagtacttttttatactcgggaaatgtataaagcctcatacctaatttaatggatatgaaatttttattgacaatactgtggattactttgctattcttgaaaacccacattcaaattttatttaacaattaattttagccgagggagttgtattattttccaacggaatttgaagtatgtgaccagccaatctaagtcattcagaccaaagattaaaaatttcagccaggcacagtggctcatgcctgtaatcctascactttgggaggccaaggcaagtggattgcttgaacccaagagtttgagaccagcctgggccacatggcaaaatgctgtctctgcaaaaaaaatacaaaaattagccaggtgtggtggtgcatacctgtagtctcagctactaggaaggctgagatggtagattacctgagcccagggagatccaggctgcagtgagctgtgatcatgccattgcactccagcctgggcaacagactgagaccccatttcaaaaaaagaaatttcaggattttttcactaattatatagactataaacctcaaagatcacgggctgatggaatttgtcagtacttcatagggagctgtgcacagaggggaatttaatgcatgcagttggtggtaatagtggtgacctcaactgttggttttatttagctggtacaaaaaacagaatcaagcatttcattgccttttgtgcaaattacagctgtgtttttctgttgaacacttaacagaaatgttacagtgtgaaagctataaacgaaggatgatggccgtcatgtccttggaagtaatttgcttagcaaatgatcaatactggagatgtattttggatgcaggtgatgcaaactctattaataactttttatgctattttatgtagagctatattttattcatcagtcatttttaaatatatttttaattgtaaaggaaaaattttagttgattttcagtttcttttgctaagatcacttcatttacctgtcaaccatatattttattttccacatggaagctgcacaggatcaaaaaactktatcaattctatttgtctaaaagctcgaaaaattaaaaaataatgttaagtgttaatttaaatgttaaattactttaccacactacttttatacttactttcatttagaaattattcctattctgtaatttgcacaatttacttttgaaattaaaaatagcagatttagtgtcaggtctggtttgtaactacctctgcatttagaacttaagaaaattgcttaacctctcttagtttactttactcactaataaaatggctctactggggtccgttccaagatggccaaataggaacagctccggtctgcagctcccagcatgatcggcgcagaagacaggtgatttctgcatttccaactgaggtacctgcttcatctccctgggactgattggacagtgggtacagcccatgggtgagctgaagcagtgcagggcatcgcctcacctgggaagcacaaggggttgggggatttccctttccttgccaagggaagctgtgacagactgtacctgaaaaaacggggcattcatgcccaaacactgtgcttttccaaygatcttagcaaatggcacaccaggagattatatctcgtgcctggctcggcaggtcccacactgatggagccttgctcactgctagcgcggcagtctgagattgacctgcgaggcagcagcctggcagggggaggggcattcrccactgctgaggcttgagtaggtaaacaaagcrgccgggaagcttgaactgggcagagcccactgcagctcaccaaggcctgctgtctctgtagaccccacatctggggggcagggcatagctgaacaaaaggcagcagaaacttctgcagacttaaatgtccctgtctgacagctctgaagagagcagtggttctcccagcatggtgtttgagttctgagaatggacagactgcctcctcaagtgggtccctcacccccttgtagcctaactgggagacacctcccagtaggggccgactgacacctcatacaggcgggtgcccctctgggacgaagcttccaaaggaatgatcaggcagcaatatttgctgttctgcaatttttgctgttctgcagccactgctggtgatttctaggcaaacagggtctggagtggacctccagcaaactccgacagacctgcagctgagggacctgactgttagaaggaaaactaacaaacagaaaggaatagcatcaacatcaacaaaaaggacatctacaccaaaaccccatttgtaggtcaccaacatcaaagaccaaaggtagataaaaccacaaagatggggagaaaccagagcagaaaagctgaaaattctaaaaaccagagcacctcttctcctccaaaggattacagctccttgccagcaacagaacaaagctggacagagaatgactttgatgagttgacagaagtaggcttcagaaggtcggtaataacaaacttctctgagctaaagcaggatattcgaacccatcacaaggaagctaaaacccttgaaaaaagattaaatgaatggctaactagaataaacagtgtagaaaagaccttaaatgaccagatggagctgaaaaccatggcacgagaaccatgtgaggcatgcaaaatcttcaatagccgattcgatcaagtggaagaaagggtatcagtgattgaagatcaaattaatgaaataaagcgagaagtttagagaaaaaagagtaagaagaaatgaacaaagcctccaagaaatatgggactatatgaaaagaccaaatctacgtctgattagtgtacctgaaagtgaaggggagaatggaaccaagttggaaaacattcttcaggatatyatccaggagaacttccccaacctagcaaggaaggccaacattcaattcaggaaatacagagaacaccacaaagatactcctcgagaagagcaaccccaagacacataattgtcagattcaccaaggttgaaatgaaagaaaaaatgttaagggcagccagagagaaaggtcagrttacccacaaagggaagcttatcagactaacagtggatctcttggtagaaaatctacaagccagaagagagtgggggccaatattcagcattcttaaagaattttcaacccagaatttcatatccagccaaactaagcttcataagtgaaggagaaataaaatcctttacagacaagcaaatcctgagagattttgtcwccaccaggcctgccttacaagagctcctgaagaaagcactaaacatgcaaaggaacaaccagtaccagccactgcaaaaacatgctgaattgtaaagaccatcgatgctaggaagaaactgcatcaactaatgggcaaaataaccagctaacatcatatgacaggataaaattcacacacaacaatattaactttaaatgtaaatgggctaaatgccccaattaaaagacacggactggcaaattggataaagagtcaagacccatcagtatgctgtattcaggagacccatctcatgtgcagagacacacataggctcaaaataaagggatggaggaagatctaccaagcaaatggaaagcaaaaaaatagcaggggttgccatcctagtctctgataaaacagactttcaactagcaaatattaaaaaggagacaagggcattatataatggtaaagggatcaatgcaacaagaagaactaactatcctaaatatatatgcacccaatactggagcacctagattcataaagcaagttcttagagacttacaaagagacttagactcccacacaataatagtgggagactttaacaccccactgtcaatattagatagatcaacaagacagaaaattaacaaggatattcaggacctgaactcagctctggaccaaacagacctaatagacatccacagaactctccacccaaatcaacagaatatacattcttctcagcaccacatcacacttactccaaaattgaccacatagttggaagtaaagcactcctcagcaaatgtaaaagaaaagaaatcacaacaaactgtctctcagaccacagtgcaatcaaaatagaactcaggattaagaaactcactcaaaaccacacaactacatggaaactgaacaacctgctcctgaatgactactgggtaaataacgaaatgaaggcagaaataaagatgttctttgaaaccgatgagaacaaagacacaatgtaccagaatctctgggacacatttaaagcactgcgtagagggaaatttatagcactaaatgcccacaagacaaagcaggaattggccaggcgtggtggctcatgcctgtaatcccagaaccttgggaggctgaggcgggcggatcacgaggtcaggagatggagacaatcctggctaacacagtgaaaccctgtctctactaaaagtacaaaaaattagccaggcgtggtggtgggtacctgtagtcccggctacttgggaggctgagacaggacaatggcatgaaccccagaggcggagcttgcagtgagccaaaatcatgccactgcactccagcctgggcgacagagtgagactccatctcacaaaaaaaaaaaaaaaaaaaaaagagagagagagaaaccaggaaagatctaaaattgacaccctaacatcacaattaaaagaactagagaagcaagagcaaacacattcaaaagctaacagaaagtgagaaataactaagatcagagcagaactgaaggagatagagacacaaaaaaccttcaaaatatcaatgaatccaggagctggtttgttgaaaagatcaacaaaactgatagaccactagcaagactaataaagaagaaaagagagaagaatcacatagacacaagaaaaaatgataaaggggatatcactaccaaccccacagaaatacatactaccatcagagaatactataaacacccctacacaaataaaccagaaaatctagaagaaatggataaattcctggacacatacaacctcccaagagtaaaccaggaaaaagttgaatctctgaatagaccattaacaggctctgaaattgaggcaatacttaatagcctaccaaccaaaagaagttcaggaccagacagattcacagccgaattctaccagagatacaaagaggagctggtaccattccttctgaaactatttcagtcaatagaaaaagagggaatccttcctaactcattttatgaggccagcatcatcctgataccaaagcctggcagagacaaaacaaaaaagagaattttagaccaatatccctgatgaacatcgatgcaaaaatcctcagtaaaaaactggcaaactgaatccagcagcacattaaaaatcttatccaccatgatcaagtcggtttcatccctgggatgcaaggctggttcaacatacgcaaatcaataaatgtaatccatcacataaacagaaccaacgacaaaaaccacatgattatctcaatagatgcagaaaaggcctttgacaaaattcaacagcccttcatgctaaaaactctcaataaactaggtattgatggaatgtatctcaaaataataagagctatttatgacaaagccacagccaatatcgtactgaatgggcaaaaattggaagcattccctctgaaaactggcacaagacagggatgccctctctcaccactcctattcaacatagtgttggaagttctggccagggcaatcaggcaagagaaagaaataaagggtattcaattaggaaaagaggaagtcaaattgtccctgtttgcagatgacatgattgtatatttagaaaaccccactgtctcagtccaaaatctccttaagctgataagcaacttcagcaaactctcaggatacaaaatcaatgtgcaaaaatcacaagcattcttatacaccaataatagacaaacagagagccaaatcatgagtgaactcccattcacaattgctacaaagagagtaaaatacctaggaatccaacttacaggggatgtgaaggacctcttcaaggagaactacaaaccactgctcaatgaaataaaagaggacacaaacaaatggaagaacattccatgctcatggataggaagaatcaatattgtgaaaatggccatactgcccaaggtaatttatagattcaatgccatccccatcaagctaccaaygactttcttcacagaattggtaaaaactactttaaagttcatatggaaccaaaaaagagcccacattgccaagacaatgcatcctaggcaaaaagaacaaagctggagcaatcatgctacctgactccaaactatactacaaagctacagtaaccaaaacaacatggtactggtaccaaaacagagatatagaccaatggaacagaacagagccctcagaaataacaccacacatctacaaccatctgatctttgacaaacctgagaaaaacaagcaatggggaaaggattccctatttaataaatggtgctgggaaaactggctagccatatgtagaaagctgaaactggatcccttccttataccttatataaaaattaattcaagatggattaaagacttaaatgttagacctgaaaccataaaaaccctagaagaaaacctaggcaataccattcaggacataggcatgggcaaggacttcatgtctaaaacaccaaaagcaatggcaacaaaagccaaaatagacaaatgggatctaattaacctaaagagcttctgcacagcaaaagaaactaccatcagattgaacaggcagcctacagaatgggagaaaatttttgcaatctacccatctgacaaagggctaatatccagaatctacggagaacttaaacaaatttacaagaaaaaaacaaccccatcaaaaagcgggcaaaggatatgaacagacacttctcaaaagaagacatttatgtagacaacagacacatgaaaaaacgctcatcatcactggccatcagagaaatgcaaatcaaaacaacaatgatataccatctcacaccagttagaatggagatcattaaaaagtcaggaaacaacagatgctggagaggatgtggagaaataggaatgcttttacactattggtgggagtgtaaactagttcaaccattgtggaagacagtgtggcgattcctcaaggatctagaactagaaataccatttgacccagcaatcccattactgggtatatacccaaagcattataaatcatgctgctataaagacacatgcacacataggtttactgtggcactattcacaatagcaaaaacttggaaccaacccaaatgtccatcaatgatagactggattaagaaaatgtggcacagatacaccatggaatactatgcagccataaaaaaggatgagttcatgtcctttgcagggacatggatgacgctggaaaccatcattctgagcaaactatcacaaggacagaaaagcaaacaccacatgttctcactcataggtgggaattgaacaatgagaacacttggacacagggtgggaaacatcacataccagggcctgttctggggtgggaggcagggggagggacagcattaggagaaacacctagtgtacatgacaagttaatgggtgcagcaaaccaacatagcacatgtatacctatgtaacaaacctgcacattgtgcacgtgtaccctagaacttaaagtataataaaaaaataaataaaatagttctaccccataggattgttttgagaatagcactgtccagaataactttctgaaatgatgaaaatgttcagttgggcatggtggcccatgcctgtaatgccagcactttgggaggccaaggcaggaggatagcttgagcccaggagtttgagaccagtctgggcagcatagtgagaccctgtctttgtctttatctatatctatctatmtmtatatctatctgtctgtctatctgtctgtctatctatctacacacagacacacacrcacacacacacacacacacaaagaaaatgttctatttgaaaatgtccaatatggtagccactaccctaatgtggttattgaactcacgtgagatgctccagaaatattaaatgaataaattaaaatttgattgatcatagatagtcccctgatatgttcctgaaaacctgtacaaaaagctctgtatccaaaaggtgaacttaaagaagtcatgagggatgtttcatttcagayagctaaataaataaggtctttattatatctattatattttctgtcattttgtgcatgtcctataaggtgctttctatttatcattaaattgatgtaagtataacaggcatccacctgaagccagattttctattttcttttttttttttttttgagacggagtctcgctctgtcgcccaggccggactgcggactgcagtggcgcaatctcggctcactgcaagctccgcttcccgggttcacgccattctcctgcctcagcctcccgagtagctgggactacaggcgcccaccaccgcgcccggctaattttttgtatttttagtagagacggggtttcaccttgttagccaggatggtctcgatctcctgacctcatgatccacccgcctcggcctcccaaagtgctgggattacaggcgtgagccaccgcgcccggcctattttcactatggctaatttctatctttgagcctattgtaattaatgagactaatgttgcattttactagattcagcactttttgtttttcacatcctkgtataaaataaggataaaatataataaaatactcaaataattgcataagcagtgccatgcgaagttgatgcaataaccaaaaytgacctgtaccatatggtagcacaaagaatttatttatcaataatctgaagccagaattcagtgtttcaatggtggcttaaggttactaatataaaatgtttgatcatgctctgtgaaaatcaaatgtatgaacaatgagagctgcccataccaaagacaagatggaaggtttcttcatgtagtttcaaatgataattttataaatattttatagaattatttcataattatttatattgcaatgcccataaatattatttaaatattgccatgataaattgactacaaatggttaccaataattcatgctttttaatttttttgctcttgtcattacaggcaccattcctgccttaatcaatctattaaaaagttccaaaataaaactgcagtgcaaaactgttgggttattgagtaatatctcaacccacaaaagtgcagtgcatgctttggtagaagcgggaggcattccatctctaatcaacctactggtttgtgatgagcctgaagtacactctcgctgtgctgtcattctatatgatattgctcaatgtgaaaacaaggatgttattgccaaatatgtaagttcctttcatatacaattatttttgactgacaataactccctcatatagaagttacaaaaatagaaacccacgttactattcagtgacaaaactctcagggaagaatacagcagggaaaagggagagagggtgcctgatgaaaactccaccgaaaagttggcatttgagtacggtccagaagtagatgagggagtattttcataagttagtgtatgttgattgcttcttgctgtttaccaattacagtgcagtgtctacaatggcaaatatttcctaatggggcaatatattcaattaatctcatttgcttcacttagatagctatattaactgtcacataatgtatcttatcagtagacacatttgtttgtggcactcattctctcccaaatagttatttacagcaagaaagattacagacttgtgtttctttttttctttttttttttgaaacagtcttgctctgtcaccaggctggggtgcaatggtgcaatcttggctcactgcaacctctgcctcgtgggttcaagtgattctcctgcctcatcctcccgagtagctggaactacaggcacgtgccaccacgcctggctaatttttgtatttttagtagagatggggtttcaccatgttggccaggatggtcttgatctcttgaccttgtgatccgcctgcctcggcctcccaaagtgctgggattacaggcgtgagccaccacttccggccaacttgtatttctaaataaagattacatttatcttaaacaaattcaaatgtaattttttttgtttatttttagaatggaatcccaagcctgataaatctattgaacttaaacatagaaaatgtgctagtaaatgtaatgaactgtatacgggtattgtgtataggaaatgaaaacaatcaaagagctgtgagagaacataaaggcctcccatatcttatcagatttctgagttctgattcaggtgagcttctatctctgtattattttataatgaccagatatattaagtgaagcaaacatgggattggacttgtcctatatgaatagatgtcccgaatctgtgtttgaatagatstaaacgtgtaatataaccttaatatccaaaacacaatttatttatttttcctaactgctaaactatgtagatacagttaaatttatttatattttatttttctcaagacagagtctcagtctgtcgcccaggctggagtgcagtggtgtgatgtcagctcactgcaaactccgcctcccgggttcaagaaattcttctgtcttmgcctcctgagtagctgggattacaggcatgcaccaccacgtccggctaatttttgtatttttagtagagacagggtttcaccatgttggccaggctggtctcaaactcctgaccttgtgatctacccgactcagcctcccaaagtgttgggattacaagtatgagccaccatgcctggcagataatgattaaatttaaactgctgggcttataaaaataattgactctcaaaggcatattctttaaaaaagtttaattagacatgtttatcaatggaaatattggcatggatgattttaaaaatacatataatatgcctaggagagtatatgctaccttgggtgaatagtacatattgatagtaacatattgatcatgggtagctattttgcaagtgacaacaagggcttcagatttgttagatatttgacgtcaaaattcaaggttatcaggaagcattaggccaattatcagttcctaaagtgcgtctcagtaccaagaacatcaaaagccatgaggcagtttcagcagctactgcaaatggtctcctgggttctgtaagaataatttcattccagttagcacatttaacaggtaagttccaaatatacggttttccccaaatttgggggaagagaaaattgagaagaacttgctcattttcttcctgctcagtatatcatttggcttcctcttccagttcaccaggaataaatacaaaataaatatattggttaaatgtaagtcragattaagaataaggggaatgtagaagcgatctttcctttactttaaaacttcaaatttaagcaagtgtcactttctaagaacctctatcgtgtggtgacatcatttgaaagccctcttccttcataacaaattccttatgctctctctgttcaagtgttcttccatcgcttactatgctctactttatcctttaagaatagcatcagaggccaggcgtggtggctcacacctataatcccagtattttgggaggctgaggcrgatcacctgaggtcaggagttcgagactgcctggccaacatggtgaaaccctatctctactaaaatacaaaaatcagctgggtgtggtggtgcacgcctgtaatcccagctacttgggaggctgaggcaggagaattgcctgaacccgagaggcggaggttgcagtgggctgagattgtaccactgcactctagcctgggcaacagagcgagactccatctcaaaaaaaaaaaaaaaaggaaaaaagaatagcattagagagggtcagcttttatgtatattttaaacatataatttttactcatttatagtcattctttatctctttttttgtttgtgttttatctaactaattaaaatttaaagatagggactaggtcttctctttctgttttccttttctcaatcccagatgctgtaacaaagtacaaattgtagcaacaatttgaataaataaataataaatgagttcatgaaagaaaactatagcaccgggtgtggtagctcacgcctgtaatcccagcactttgggaggccaaggcgggtggatcacaaggtcaggagatcaagaccatcctggccaacatggtgaaaacctgtctctactaaaaatacaaaaaaattatctgggtgtggtggcgcgtgcctgtaatcccagttacttgagaggctgagcaggataatcgcttgaagctgggaggcagaggttgcagtgagccgagatcatgccactgcactccagcctggcaacagagagagacactgtctaaaaaaaaaaaaaagaaaagaaaactatagtatgaaatmaattattgaaataaaagtattttttcctacaccataatctacattatstcctcactccaaggaagataacttaattttgaaataaattttaattattttttccttttaggtaagcctccctatataacttyagtgctttagcaaatagtcctcttggatgttagctgggttgttaaggtataggagatcacaaaggcatattattaattccagtgtcttctttaccatgtgagctactctaagatttcatgtattaaaatggccccaaagtagattcacatacagtttcttgaaaagatggatttgttaacatctccttggtctgagtctctatgtccagagcaaggctacccttgctaagtttggtttgttttaggcctttccttcacccatttagctgcttgtatgcacattcttatatacatatattcatgtatgcatgctttcattcctacaatgcttctgatttcatatggtaccctactttcctgttctgtgttaataacaaaagtttatatgacaccaccacagaaactcaaatatgtaacaaaagcatacaaaatgctttttcagtttcaaactgagaaaaacttaaaagatcacctcattttttttcttggaatgattattcacatatttctgcagaaattgattttctccagaccctttgtgatgttatacaatatgtagtattatgtactccttacattctaaaatctgaaaactttggaattatgaccccaaaagttgtaaagtctgccttcaccattagtcctcctttagccaactcttaaaagttggagttccttaagcttccattcttgtcatactgctgctttcatccagcatactcttctttacctcttattcactccaaaggaactctactaggtttacaatctattcttcccagttctttatccacatccctgacgtcttccctgagctttagagctactttggattactgaatagcttagtaaagacacttccattcctttcagaatttgggtccaaatgagaaatagacaggaatcaaataaagatcaaaacttcagcattattgttggaaagcttgctttgagaaaacaacaaaaagtgccaaaaagaacgtaaaccatgcatttgcaatgactcattcttcaaattaaaaaattatgtaactcactattcttctcatggggaagaatgagtaaggggtaaatttttattcttaacatttctgagttggccatgggtagaggaatttctactttttgtactgattcaggaatagtgggtaagggaaagaatggtttcccccacactctcttaattttattaatctttcagggttaacattccaagtgttacttgagtgatctaactaaaatgtaaagttgatcatatcttcttctttaaattattcagtgactctctatcacctaggatatgatccatgtttccagcatggcctatagccctttttacttccctacttcaagaggaaatgaccttcctgtcactccctttttctctgatattactctcaagtaatattgaacttattgctttgttctttactctggcctttccttttgttcgacaaggtcaaggaccttgttttgttggttcacctttatttccctagtgcctgggacagtgtctagcacatagctattcaataaatatgcattaaataaatgattagatgattaaatgaataacatactcataacaataaaaatagttaatatttttgacataaattgatataaagtgggtatagaagttggtatgaacaataaggccttaatagagagataattaaccttgatagtatatgaaaaaacaaatgctggattatagagcatctaaaggatatagttagctacatgaatgcacaaacacttttctatttagttttgcttttggaaatatattgatattctacataataaaaaaattaaatctacaaggctgggggaaatgaaaactgaaataaattgtataactagatttaaaaagaaaagaaaaaatgaatacaaataattttaaacacagtgcattatataccatctttctaagggtaaacacaaaacaaactacacacagattttgagttctttttagtgagcttgtatgtcataatgatatgggtagaacaattctgaacccatatgataagtaccataggactaaagaaatgaataaatgtgttgatattattgggttcttactgtgcaaagaaatgtgcagaatgtaggaaaacaataaaccctgtggggttggattggaactggaaatgtatgtgtgtatgtatgagtgtgtgtgtatacacatacatatatatrtatacatattttatatatatggatttatacacacacacacacacacacacacacacacmtatatatgatccagaagcaatgatattccagtagcaatgagcataccgagcacccaaatcttggtttctaaatatcatccctcattaaaaggaaccagagcttcttggagaaatagttgattctggggcaggggcagagaaggtatatggtgagtcaggaacatcatcatatggtgacagaaagtaataaaatccttttttttactatctatatctataggcatatctataggacacaaggacaacctgaaggggctcccactggccaaatcttagacaattttgggtaccaacataagtaagaaartacaccgggcacagtggctcatgcctataatcccagcactttgcggggccaagacgggcaaatagcttgagctcatgagttcaacaccagcctgggcaacatggcaaaacctcatctctactaaaaatgcaaaaattagctgggcatggtggcacatgcctgtattcccagctacttgggaggctgaggtgggaggatcgcttgagcctgggaggcagaggttgcagtgagctgagttcatgtcattgcattccagcctgggtgacagagcgagaccttgtctcaaaaaagaaargaaaagaaaagaaaagtaaagggttgaataaaataggagcctgtgccctcatcctgataacaactggataaacaaggaaacaaataaatagagaataaggtagggctcttccttatagcagaatgtcaattgacaaatgtgaaggggtggtagatttggaaaattagtattttgcaaacagcatagtaaagattggttcaggcaaaaattataaatggttgctaaatcttgggggcaaattttgatatttacatggtcttaaagtgttttgctccttattagttgcaagaggaaaaatagcaactatacagtagagaaactgggtgatcaaaattaacatcaccaatgaggaatagatggacattatataactccacagaggatatccccagaacctaatgtcactttttttttgaaatgaggttgctatgttgcccgggctgatcttgaacccctgggctcaagcagtcctcccaccttagcctactgcatagctgggattacaggcatgcaccactgcacccaagccataatgtcactttaaaaatattctggatggaggtgcatatcttgagtcatgaggamacagcaaacaaacccaaactgaggaaaattctctaaactaaatgacccatattcattaaaaatgtctatgtcataagagaccaaaaaacccctgagaaaaggttccagataatagaacactaaagagacataactaagtgcaatacatggtcctggtctggatcctgtactggaagaaagtaaatgtgataaaggacattactaggaaaatcaacacaatatgattaaagtattgcatctactaattgccttgtagttacataaaaggataggcttgtttttagtaaatacacactagactattaaagagataaaaggccacgatgtatgcacgcaacataccctcaaatttagaaaagtaaattatatagataaatggatagaaaaaccaatatggcaatatattaaaaatttataaatccaggtaaaggtatacaggaattctctgacttattcttacaacttttctataagttaaaaaaatgcaacttgttaaaatataggaaaatgtttagactcactaataccaaaaatgcaaaacaagatgagacagcattttttctatcaaatttgagcaaagttgatgtatttatttttaatgataatacccatattgaaaaaaacacagtgtaastggttaaaagaatataggagaatgtttagaatcaccagtaccaaaaatacaaaacaaaatgagacagctatcaaattagcaaagtttacatatttatttttaatgataatactcatactcaaacacagtaacattgatacttttgaactctgattatggaaggctaagatgctattatcatttttgataagcagtttactcagatgtactgagttattctggtaattcctctacaaaatcacaaaaattagccgggtgtggtggtgcacacctgtagtcccagctactcaggaggctgaggtgggaggatggtggaggttgtagtgagctgagatcacacacaccactgcactccagcytgggtgatagagccaaaccttgtctcaaaaaaaaaaaaaaaaaaaaaaagggtggtggggagggaatgttttaattgtaagtaaaaatgcaggctgttgttttaaaatacaactatatcaaatacatctataactatctaaatctatcttcataagaaatagtacatgagattatgccaaatgtttgattgtgtttaggtggtaaatctrgccagttttgtttatttctatttttctttattttctctaagctttttataaatttgattttataatatgggaaactaatgatatgctgcactttgatattcttatttttcataaggtttatttaacttgttcttaaattcatttgaagatgtgttgaaggctgtatcttctgctgcaattgctgaggttgggcgtgacaataaggaaattcaggatgctatagctatggagggagcgattcctcctctggtggctctttttaaagggaaacaaattagtgtccaaatgaaaggtgcaatggctgtggaatcactggcaagtcacaacgctcttatacagaaagcatttctggaaaaatcgttaactaaatatcttttaaaactcctaaaggtaggaattttatgattactggtcatttttcttagatgatgttttctattttgaattgttaagtgaatagaaaaactaaaccaattctagaataaacattttataaaatatgcattcctaaaatgttcaataaatgttcactgaattaatgaaatatttttaaaaataggcatttcaaatagatgttaaggaacaaggagctgttgcactttgggccttggcaggacaaacactaaaacaacaaaaatatatggcagaacaaattggatacagctttataataaatatgcttttgtcaccatcagctaaaatgcagtatgttggtaagttattttccttattttatttttattttttagagacaggatcttgctctgttgcccagcctggtgtgcagtggcacaattatagctcactgcagcctcaaacccctgggctcaagtgatcctcttgcctcagcctcccaagtagctgggattacaagtgtsagccaccrtgtcctctgcataatgtagaacagggcactggagtatcatacatgtatcttgcttttctttatcaggaggtgaagctgtcatagctctaagtaaggacagcaggatgcatcaaaatcaaatatgtgaagggaatggaattgcaccattggttcgcttactaagaattagtacgattgctgaaggcacacttctcagtgtcatcagagcagtgggatccayttgtattggtttgtatacttattctcaatttcttaaatatctgtaagaacaagaacagattgcgcagagaagtggaaattaatctctcttcctctctatccccactgtttgagccctaaatggtatttaatgtatgaaagactattataacttttaaagtttgtctaagaacttggtcagtaaaagtggtataattaagaatcttatatcagtcttgctcttgaacaatggctagaaaggaaaattaagacaataagccttgactattttgactgaaagcaatctcttttttaagtttaagagaaaaatagttcttttgaatctcaagaacgatatgtttttgaagayatagaagagtttctaatgctggagcacattcttgaatgtctctgtaatgatcatttrtttatataacatagaattcattgcaaaggaattgacattgtggggtacctgagaaaatgtggaactgtcagttgtgacccaccaaaagttaaaatttgggttcttgctgaccttgatgaatgcagggtgctgattgtagactgcttcttgcaaacaagaggaaaaatctttatttccagatcactgaatttcctcaaaaatagtccagctgaatgaagtataataggaattgattctcacatttttttctctttgcttgccaaaagtttcttgcagaaactcattcacaattccaagataatcagccagagaagatgtttctttttttttggccagagactctgacataaattacagttatttctaaagttctagtaaatgataatatatatgcaaggttgcctgatatacatacacatgcacataatcaaatttcttcgcattagttcatttcaaatctgtccacatcagctgtgcgtgtgtgtgtgtgtgtgtgtggtgcgggtggtgtgggtttgtggggacaaaggtgttcttttttccttcaaacttccctagatacaatatgtaggtgacttctcttcattgttcactgagaggctcaatcttatatttaacccatttatttagggttaacccatttacataaacccactgtatatttattgtgacatttaatattagcaaaagaacagagttaaaattctttgtccatgttcactagaaagaaatgagtttctcaacaggaaattgcaaggagtggaaaaaaaaaaagagagagttgagtctctctggtgagtttaggcctgcaatttaaagtagtatgttataaagagacatagtaagattatcttgttagcgtgtataatttaagaaaccaagaaattttaacttggtgatttactctattcatttttgtagaagtaaactttttatrgaaaacaacagaattatgaacttaagtacctcgcacataatatttcttcaataaatgatagctattagtattccttggtagtataatatttctaatttcctttgctttgtgacttttaggaagccactcacaattctaataaagtctccatgtttattcactttgtcttttaaaaaattaattcaggactattaaaatagtgtcaatatagcatacccctttgtaacttactaactgtattaccttagaatgctttgtcaacccaaaatatcaagctatgtttgactttaccatttgtaagatggaaaaaaatattacctcactggcgtggactcttacaggtgtagcccatacaagcaatcctgtcagtcaacaattkgttgtagatgaaaatgcctttccagtacttatccaactactaagaaatcacccttctcctaacattaaggtataaaggtttacattgttttctgatatggtaaaaattaacaaatataattttaagaaaattttgtatctttattcaagttcataaacataaaaatatttaatcttttaaactaaatcctatttttcttggagaaataagccaaaaataaaaataaaaataaacaaaatcctagaagttttaaaaaggttgctgcaaaccataagatactagtaaattttattaaaatagggtttcttcaaatatgacaagaaaatcttatgtttttactcttcaaataagattttcctcagatatttgattatttattcacaaaagttcttttctacctccccagacatcagttgctaaaactgggcggcgatagtgggaatgtgtgacttatatgggaatatttctcaaatattagtgaatcttgtcagtactacacttcagaccagccctgccttctgtcaagcagcctctgttggctggaggtaatagttttctcaaggctggacattacaaagaattattgtgagttgttgaagagtcattcagtcttccatttacttctactaaaatgcctttaataaartgacatttacatctattcaaatactcttacccaggctttagaaattcaggacatctatagatggccaggcaagaaattataacakcaaaaaaaattttattttcaaaatttggtatgcatgctactggagatgagaaaatagaaataacataggaggacaatatctaagtaaatagcattgtttctttttcttttttcttttttttttttttttgagacagaatctcgctctgttgcccaggctggagtgcaatggtgccatctcagctcactgcaacctccacctcctgggttcaagtgattctcctgcctcggcctcctgaatagctgggattacaggtgtgcatcacaacgcttggctaatttttgtatttttgtagagacggggtttcaccatgtggccaggctggtcttgaattcctgacctcaagtgatcttcccacctcggcctcccaaagtgctgggattaaggtrtgagccactgcacccaggctgtttctttttttaatctgtatttatttatttaattttttttaaatattgagatggggtctctcactgtcagccaggctagagtgcagtagtgcaatcttggctcactgcagcctctgcctcccaggctacagtgatcctcccacctcagcctcctgagtagctgtgactacaggagtgcaccaccatgcctggctaattttttgtatttttgttggagatggagtttcactattttgcccaggctgttctcgaatgcctgggctcaagagatcctccaccttggcttccaaagtgatgggattacaggcattagccaccacatctggtgcattcttttaacaaatgtgtgtcttatcataaaaaatgtatccatctatatttcagtacatattttcaatgagttttgaaacttgtttaaatagaacataaatacatttcaatactttttctcaaaagattctataatggataaaacattttgcaataattcaataatcatacttttcaaattcataatgtttttcatagaaatgcatagtacaacactttaaaaacttatctactgagtcccaataatatgcaaagttcattttcctaatgggcttcagaatgtacattaaatggttccagaactagaggaggaaaaattagtagtactatttcttagtactactccccaaagttttgcttaaattaataggtgctgcaggccaggtgctttggctcacgcctgtaatcccagcactttaggaggacaaagcaggcggatcatgaggtcaggagttcgaggccaacctggccaacatggtgaagccctgtctctgctaaagatacaaaaaattakctgggcgtggtagtgcgcacctgtaatcccagctactcgggaggctggagcaggagaatcgcttgaacccaggaggtggaggttgcagtgagctaagatcatgccattgtactccagcctgggcaacagagcaagactccatctaaaaaaaaaaaaaaaaaaaaaaaaggtgctgcattaaagccttacaactcaatggtcagtagttaacaagcagttcaaaatagctttttaatccatgtcaaaaaattaaaagaacttttttttaatatgkaagggatacaactatgtacttaggataatacctccttacatgctctgctcgcccttgttcctttctccagtgccctcaaatggagctctgtggttggtccctgaacacagaaaggatattttctcagctattaaaaattatgagggagttgtaagtgcagttctttcgctagtaagataactggaatcaatggattatattttagcagattttatagtatctttccacaatgtattctatataaatgcctgcacaatgaaatgtgtaatttcataaagcataattgaaaagtaatttctgaaaaccacatgtttaggttgaagtggcattttccttggcatgcattgtcctagggaatgatgtgttacagaaagacttacatgaaaatgaaggatttgaatatgctgatgtcctttatcttcttcactcaacagaaaaggtaatacctttacaaaatattgaggttcattttgaaaaaaatggtttttataccacatcttcaaattatcaagtcttcttcatggcaatattcaatgtattgtttaagaaaagacatgtaaaagatctctttgtaggtcattagtttgtaatgatgtaataatacagctccatatttttctgagttgtcccacttcatcgttgaaatgcagtaattttaatgtttggtgatgagtcaaaaaacaaatctcttatgtcccaaatcaaacctttacaataattttatgccctttcagccctcagtcattcacttatccaatatgctaaaggggtgcttctcaaactatttatgatgaagaaatagctttttcccagcaatctattatggaaggataattttttttaactttaaaaattttgaaataatcttagactttccaaaattctggtatatccttcatctagttttcccaaatgtcaactagaacattaacattgatacaatactattaactaatttgcacgccttatttaaattttgccagttttctcagcaatgtcccttttttgttttttttatttaatttaaaaaattatttttatttttttcaatgtctacttttgttccagaatctaatccagggtctcacattacatctaaatgtcttgtctctttagcctccagtttgtgaagctcagcccttctttgtttttcatgatttcatgtctttcatgattttgacatttttgatgaattcaggccagttattttatagaatatccctcaatttgaccttgatgttttcccctaattaaattgaagttacaccttttggcaagaatatcacagaagtgatgtggtcttcttcactcaccttcccagtacatcatagcatgaggtatataacgttgatgtattttactggtaatcttaattttgattactcggttaaaatggggtctgccatagttcttcgctgtttttccttttgtagttaataagtatcttaaggtgagacactttgagattatgcaaatattttgtcttgcatcacacttttgctcaccaatcttagcatccattgatgcaacaataataaatgtaacatttgcctaagggcaattaaaaaaattcccttcttccttctacgtttattagttggtattcaactataaagaagatttgtttcttttcaatgtttattctcagttttgttatcccactgttaatgattttgtggactgtcactggtccacgggccacactttcaacagcwctaccctaaggaaatgagagctattttctacagggcatttcacaaccaggaagaaaattgccagcgacgtttctctcagttctgtaaggttttagagggatcaaggagggtcaggaggtgggtgggaattaagtcatgttatttttttaatacaaaattttaytctactgtggtacacaaaagagaagtgctgctataaaaatatgggaaatattttgggargtcgaggtgggcagatcgcttgagatcaggagttcgagaccagccttgccaatatggtgaaaccccatctctactaaagagataaaaattggccgggcgtggtggcacatgcctgtagtcctakctacttgggaggctgaggcaggaaaatcacttgaacctgggaggtgaagattgcagtgagccgagattgcatcactgcactccagcctgggtgacagagctagactccatctcaaaaaagagaatatatatatayatatatttacagtagagtaaaaaaawatatatatataaaatatatatatatgtggaaactaatagggtgaggagactaaatgaatgtctrcctgactctctaagccaccttttgcccctctactctgttccttctagcttttactcccattaccttactcctcatgtgcacccttcttctcccttttgttacacattccactctcaagtattctgccttccttcccagtttgttaccacctgcttcactctctggaccctgcatttggcttataatagatttattcttgtgcatcagttctacaaatggtagggaatcttagagaactagaaggtttaaccaaaggatttatcyggccttggctgaaatttttaattctaacactcatcacaaggcaagttaaaagtcctccagggtttcttgtactatattttgcctcaaactacctgccctgcagaggcacattagtgctcttagggctttagagacagtactgaacaactatccttcattaaacctatagtgggagacttcagattacacaggtgtgttgtagaagttagaggggagggagggatgttcagcaacattaaatatgtcactgaatgaatagctatcttatggataatgacaggaatgcaataaaaattaagtcaggaacccaggttcttgtaactcctagccacattgatactgtctacatggagatgcaataggttatgtgttgtttttaaattataatttaactattttcatgctaccaaactagaataatatatgaaatggaccattgagattgattttcacaagccacataaaattagttgcattaatttagttactgttattctactctttttaattaactcaaatatgtgggctaattaattatgaatatacttttgaagagaggttagtgagcataattaacaggcactcttttcccatttataaatcagtgggtataaagtaacaataagtaaccagtgggtataaccaccctggtagataggtaaatgaaaatatatatgaagtaaagagtttaagacagttgacattggggaagaaaagtatggaaacacatgtctttcctcaagcattaatttttagccttctgaactgggaatagccaacttggttcttgtcctgtatctgatactacctggcatggtgggagcagtcaaactatgggattcattttgaaacattaatagccactttataatctaaactatttactgtagacttccacagtgataccgcaggagtgaaccctacatggaaaagaaatggaaatcagtcaagtcttagcatatttctctcacttcgctctatctgaccttgatrcacaaagcatgcccctttggttcatttcccattgccactctttcctacttggctctaggttctattttgctgtctgttaatccacgctttgactatgaatgagacctagtttctcaagcctttgactgtacctaatacctttctttttgcctatttaggtgactgggtttttttttttttgtgtgtgtgtgtgtgtgtgtgtgtgtgtgtgtgtatgtgatttttattatggaaaatttcaaatatatataaaatgacagggtagcataatgaacctaaatgttcccacccagcttcagcagtcatcatctcatggccaatcttatttcatctatacatctactcatttctactaaattatttttgatgcaaatttcaagcatcatataattttatctataaatatttcagtatgtacatgcagcattttaatattatgattaacagtggcagaagaaaattcagggccrggtgtggtggttcatgtctgtaatcccagcactttgggaggccaaggcgagcagacaccttgagctcaggagttcaagaccagcctgggcaacatagcaaaaccctgtctctacaaaaaatacagaaaattagccaggtgtggtggcacacgcctttggtcttagctacttgggaggctgaagtgggagcattgcttgagcctgggaggtggaaattgcagtgagccaagatcacgccactgcactctagcctgggtgacagagggagactttgtctcaaaaaaaaaaagaaaaagaaaaaaaaagaaaagaaaattcaccaagatgaatgagttctttctgtgtgtaatacattgttcaaataacatactaataatmcaatatattgaattatttttaatattaaaaataagatttagtaataagattttatcttttgaatctttctggaaggtctgccatacttatatatctctggcaagcagactaattctacagaagaaactagcttttgctgtttgcccagcctcagaatgttaaaatgtgattcttcagaatacattatttttctcctattcttccttaaaatatagtacaatggaattttacaaatgaatttaaggattgatatggaatacccaacaatgtatggaatgcaatagataacatgttatatacaagggtagttttgatttatcaactctactttgaaatgttgaaagttacaacattctagagtaactattatctcttttccctagtaatgtcatattttactcccagtgataagaatgcaatatattttaatgagcaagaacttaaagtctattatgttgagtaacatgataaatgaagttcaccataatgcctgtttctcctatttttaggatatttgcttaagagcaggctatgcattaacactttttgccttcaataatcgctttcaacaatacttaatattggaaagtggaataatgaccatatctattttygaacgttttcttgaatcaacagttgaaactgagaaggcaatggcagcatttcaggtataaaattgagattaacacctcaaattaataaatatgtcattttgtgaaaacttgaaaattacaacaatttggaggcccagaaaaacgtttacttatttgtaaaaacttagtactttgcacataagccccttctacctcataaaaactccattatctatgaggatttcttcattaatacagaattttacaagttataagacacttgcttatgcctttatacctcatctgatgtttataacaagcctgtaaggttgacaatcaggtagtattattttcatcacccccatattaaaagtaaataggtagaaaaacatgttagcatccaagacaggttttctaactgcaaatctttagttgatcacactgatccttcaacctagtaacaactgtatgtatctgggaagtcttattctctctcttcattttctatcctgtgccctttaagagaagtaatttctatgaacccatattgaaagggtgcaaaagttgcaaacattgtaggaagaataatagtaccccctatgatcactgctatgaccagacagggacaaatactctaactctccccaccaccacatgctgcttctattgaatcctctaaacactccctttaagaagtatcaaaagaattaaaaaaaaaaacataaaaaatgacaaacgtgtaattagagaagctgagtagaaaatgttcaaagactctctgcttcttttctgttttcagattgttgtactggctaaagtcattagagatatggaccatattactttgtctgcragaggtgttactattttagttgatagtctgtattcagttcagacttctactattgtcttgacaggtaagaaatgactagaagttaattttagccacataaaactattttcaaaaacagtttattgtaatctgaataataataaaataatacgcctgatacactgccacaagtttaaagaacgawcttatgtttatatctacatggaactccacagcaagtctacacgaaacaatgggtgtctactctgtaccccaaacagaagctgagtaactctgaatacagactttttgctttcctaattactttttcaaacccttaacttttttttccaagatataaatgagaattcacctwtgacctacaaacagcaaaataaaaaaactgatttataatagtggtggcagatttacacagatgtacctctgtctggtttcyttttgtccagttgtgcacattttgctaacactgaaaagttctttacatcrctgtgcaacaaagcaaagcaagatggtcccatagcgttctcaacacatttattgctattgtataactgtgtctactgcagacctaacccaacagctcacacataataggtgatcagtaatatttaattgacttgttatgccactcttaaagtaacataaggcagggtcagaatgagtaatatgcagtgactactaccaatataaacaaataagtatttgttttttaattaaaatgtatcactaaaggaaactttacttgatgccatagaattacatgtttatgaagtatatgtgcatggcaaggaaggaaaaatgaagcaatgaaaactttctgatggaaactagctagaaaaaaagtttaaagaagttattaaatatgttttaatctaaataacattattaattcaatgttatagtaattctgtgactctgaaaaacaactgtagtgggtttagactccacagttttttttttttttgagatggagtctcactctattgccaggctggagtgcagtggtgcgatcttagctcactgtaacctccgcctcccaggttcaagcgattctcctgcctcagcctcccgagtagctgggactacaagcatgcaccaccaaggccagctagtttttgtatttttagtagagatggggtttcaccatgttggccaggatggtctcgatctcttgacctcatgatccgcccgcctcggcctctcaaagtgctgggattacaggtatgagccaccacacctggcctccacaaactcttataggaaagaaatgccatattacattggctttcaaatattaaattaattcctccaggatgaggagaaatgaatctcagaaattactggactttctctgcactccacaaccagtcatatgcatgtccagggtatctcaggcaaagcttgatattcaggcctcaggtatagtgtaaaataactgatgtgcttggtgtcaagttgacatggtttccagaagatgctccaaaggcacagaagtttttaggaaactgatttctgttaccaagaattcagttttcctatttataccacttagctattctctactcggagttcctccttctactcctttgagaactataaactttagttctctttcttagctgctcccttggtctgtttccatttctaacttcccatctttaaagggtctttttaactttaaatagagcttacctttagacaatttttgctttagatgatacaaccaattttccccattcggaggcaataaacacaaggaatttcttggcttataatagaggccagacaaaaatataaggagaacaaaaactcacgtcatatctcaataaagtatccacatactccacacagaaatatgaaaatacatttttatcttcaaacaaatataaatgaaataatattcagttgctagctgcacatttaattattgggacactttattattttaaatctgaaaacatttacttttatgtaaaaacttcagtgatttttaaacctcaataagcaatacattgattgattttaaagtattaataaggcttaactcaaagccatttcaaccgcaaaaaggacatawtaatttttttttttttgagacggagtttcgctcttgttgcccaggctgtagtgcaatggcacgatctctgctcactgcaacctctgcctcccaggtacaagcgattctcctgcctcagcytcccgagtagctgggattacaggcatgtaccaccacgcccggctaatttttgtatttttagtagagatggggtttctccatgttggtcaggctggtcacgaactcccgaagtcaggtgatctgcccacctcggtctcccaaagggctggaattacaggtgtgggccaccacgcccggcctaaattttcttatgataattaaatcattatgttcatagttatttttaaaaccctaaaaacttcaaaacaaaatatattctgaagatatgggagaaagaaaacctctaattttcaaatttttcacccttacataaacctatttaatttacactatttgtgacagaaaaccaaactgtaattttggggagtttattctatatttacatatgcatgctttttctcagtgctgcttcattgacagagatgtcttgtgacacaaacttttttcagtgctatgtgcaattaatgaaagtattataagtttatatcaattaaataacacaagcatttttcttgtttaatttatagggaatttaatagcaagcctggctcattctagagctggtatcccagaagcatttaccacattaggaacaatccaacggctctgctatcatttgtactcgggaatagaagaggtaaaaacaagcaaaaactaattctaaaattaaataygctaaaaatataatttacctctccctctgtggactaatttttccactgattgactgtgttatagatataatataattcttattactaactcaaaattacatgactgtgttatatatataatatagttcttgttactaactcaaaattacatgacttttctaatactaattagtcatacatatctgccatccacaattttaattcctataaaaatatacatttgttttaaccctaagacttaaaattaggattttaatcacaaaagcagtataaaacgactacaattaaagatttaaaaagaactacctgttcaaattagtttctgatttaaaaaacaaaaacaaaaccctacaaaataagtcatcttaatcctggaattaagagtcaatctataagtacgttgatgacaaagaaacttataattgtttactaagtatctaatgaaaaccggtgactctgatctaagttatttctatgatttgaaatgaatgaaaatggaattcataggatagctttccttatgtgtcaagcagggttagatgtaagggtgtgtgaaagaggccgtgctggtcacascagtggcttgcctctgagtgttcccctactctcttccactaaggtctaaagcagtgttactccacctttagggtatatcagaatcacctggagggcctgttatattgcttggccccattcctagagtttctgagccaatacatttgaggtgggccctagaatttgcatttcgaacaagttcccagcagctgaactacaggtccagggttcaaggtttagaagacatatgagcatacagagcaaccggatgccaacataaagaccaatatgttcattctatgaaactttttatgctactatcatattccctacaactggccaggaacatactttaattaatcatatgaccaatctatgggtcatagacagagggtattttcttcaaagaactattttttctagagtcctgtggcctgacacttgtgcttctttctgtttttgccagtggaaaagtgagttgctcttgtaacgtctgaatgttaaaaaaaaatttttttaaagtaataaataaataaataagttgctttctctaagatttctgttaccaagagttcagctttcctatgtgtaccacttagctattctccaaagtgtctgttcctactcctttgagaatgataaacaaaataattaaataagagtttctagggatggaacccaggcataattgtcaaagttatatgggtgatgctaatgcattgtcagggttgcatccactaccttagttcaaactcaagttctttctttggtggcacattagaattacctgacacacacacacacacacacacacacacactagaattacctgacacacacacacacacacacacacacacacacacacacacacacacacacacacacacacacacacacacacacacccctgaaaggattctgatttagttggtgggcttttttttttttaaacactccaggtggttctaaaatgcagttaagactgagaacaaccactagaaatcaatggcagttgacagctctctgtaaaaatatggcagttaagcttccgtctatacactgccatttgtttgcatacatatttgcttacacttgctccctcccttacagagactttcctatgaaatagctaattagaacattaagatattttaagaacaaagcccactggttaagaaagaattgtttcttcatttaggttcgtgcagcttgttcctctgctcttggctacttaacatacaatgcaaatgctttccgcatcctattaaaagaatgcaggaataaacctaatcagttcattcgtataaaaaataatatcagcagagatgcaagtattaacccagcatttttaaaggaatttcaaatgcaacaaacactggtgggacttccttccttaaggtatggtcctatgttagaagttgcagtagtgaaatcatcgatagaggagactttaatgaggtttagtaagatccaacaagaggaactattcttgatatgaacatatctcctgtatagcagaggataaactttattctaaatgaccactgccacaacctgttttaattccaactcagcaccagagttgtgggtgcagacaagaacacatctagatcttagagatcctctctggccaggattattcacattttagaaagttttggggagactggttaccacaacatctgattcaagaagtcactttttagcagactagggatacatttgagagttctgagacaagaccaccacctgaccttagcatcaaatgggttttccggaccagatccaaagctaggccaaattcccagggtggaaacagggctaaattagacttagtggttagttacagtgaagtttgccaggtattcagaggattttgactcaatgttgtggtttcatcacaaacttaactccccccaaaaagggaggagaagagaatctctactatgggtatattttctcttctgtaaatgtagctgaattacaagtcttctctccaagtagtgatattcatacataggaaayagaactactcaagatacgttaactctatgataacggaagagaataggatccaatagtgcatccgaataggacccatgtacaaacatagattctacatcaattttaagtacagagaatgatgagtacatctttggagccactttaattctttgaaaagccgaaagtctaaaatgggtgacctaattttataagccagggaagctaaattgtaacattataattgataattctaaataattttcattggttcaaggaattaagataaataatgtaagtagtattttacacagtcactcccacagctagcccatgtgacgactttgtaggaattagaaaaatatacccctttctcagacctrtcttcttcaaaacccagctgaagtgtctcttctgtaacaccttccctcatcacttcaagcagatttaatgttccaaatgtttggagtaaataagtgagtaaatgagtgactgaatataaaatacttacagataacatgcagagttagtggaggtaacatgtatgaattaggccattaggcattaaacctggtactgtaagtcttcatatacttcttcatatattttttctgggtgcattatgtcttcatttattttaatgacaaaaatgttttccttttagtctggagaagaatggaggaccatccataattcctatytttaaaagaggtaattgatttttcttttatctatgaagtaccttctagcccagacactttataattctgtattccatctctaaaaattcaaaatgtaggccgggcacagtggctcatgcctgtaatcccagcactttgggaggccgaggtgggcagatcacttgaggtcaggagttcaacatcagcctagccaatatggtgaaaccccatctctactactactactactactactactactactactactactamtaataataataataataataatacaaaaattagccaggcatggtggcgygtgcctgtaatcccagctacttgggaggctgaggcaggagaatcgcttgaacctgggaggcagaggctgcagtcagctgagatcgcaccactgcactctggcctgggtgacagagtgagactctgtctcaaaaaaaaaagtagagggtacccccacaaraaagtttacctgcatactyctcttttgtaattctgtctacctaaaatatcttcctaattacaagcccatattgatcattttctgtaaggccttycctattatatcacttgaaagtgactcctgtcttattttgcttttctcaaaccatgcatagaagtaagtcattatttaaacaacctgtaaatatgactttgctgttttatatctgaaacaacttacctatctgaattctcagggcagagaccacattttttccattgatactctatatagttttgtacatagttggtacattacacttgaatggactagatctgcagagatcagagtccagatctcatattatttatcccttcctattagatatgtaatagggaatataaattacttgttaatttcacatatctgcttagtgcttgttcgtgtaggaccaaaatcagtcttgatacgttgtcctatcacgaaaatcaaggatagaaacattcagaagtcaagatcagtttgctagagtcacaaacagaaaggaagagaatttaaaaagacagtaaaaggagaggaaacaatttcatgtattcagccagtatatgagggaagctaggtatgtggggaggctatatagaaatatatatagaatatcatgggtagaaaagcatccattttttatatagcttcttgaatgttagagtaatttacataaaagaatagtcagttcactcttcactttaacactggtttctaaacaacaacctgtttatcagtcatgatctgatgaagttttcacaggtttgtagtaacataagaaaaaataagggcaaggtagcacgtttctgataaaattaatttcattcartatcaagtccatcattttgagataatgccttttacactttttttagtattaaaatattctttattttacataatgatatttaaagtagtattcrttctcttattggtgctaacttgacataacaagctagcaaaccatatagtggtccccacaaatttttggcccctgacatctaaatgtctggaagtactgatctgttctcttagtatgttttagttatgtaaagaaaatagaactacatagaagtagaagtaatgagactatacctagggctctcaggagagacacttaattgtggctaatttttagggaaggagcaccgaagaaaattaaaacctaaaattcaaccaaaagattctttgactttattacctcctgtaactaacttcatgggactcttcaaagcaacaaaaaagaccaaggattcccataatattttttctttttcatctacaattacatcagatatcacaaatgtatcaagaccaagaatagtgtgtttgaaccaacttgggaaacatgtccagaaagccaacccagagcctgcagaaggctaataaaacattttagaatgaaaggattcctgagccatcttttaaaaatttttttatttttaayaatggtaatatgcaaataacataactgaataatctttttgaatgraagttcttgatctcgatactaagcagattttccttagcatgtctacagraatttagtgtcaggtcagagttatggtttcaaaaaattaggatttctgtaaacaaaggcctgcacttaaaccttaaaatttattgactgacatgagtggtataactagtgtatatatcaagagttaacatttttaaattggtgtgcaagaagcctgattcaaagtagctcacatggtaacatttattgtaatactttgagatatttagtaataaatattacaaatgtataagtcttctaagacccaaaatgtataccttaagaaacattttggctaggcatggtggctcacacccataatcccagcacttctggaggccaaggtgggaggatcacttgaattcagcagttcaggaccagcccgggcaacatggcaagagcctgtctctacaaaaaatagaaataaagttggctgggcatggacatgcacacctgtagtcccggctattcaagaggctaaggcaggaggattkcttgagttcaggaagtcagggttgcagtgagttgtgatctggctactgtactccagctgaggtcagagagtgagaccctgtctcaaaaaaaaaaaaaaaaaaaaaaagtctgagagtcagtggatgaagcagaaaagaaaaattaaaaaagaaaataaaacaaaaattttttaaaagggaaaaaaagttttatttaaaaataaaatctgaaatcattgcccatcaagtacatgagtatggcttttgtggctaacagtgttgctcattctccatatttatagtgtctttggtttgcaactggaaagggtaatagtctttgtggcttagaascatatgatgtctttgctcmaatagcaatgtmtgcttctcctattttatagctgcagatagatatgatacaaacacctggcttcactgtgtactttattttacttacttacttatttatttatttattcgagatggagtcttgctctgtcacccaggctggagtgcagtggcaggatcttggctcactccgcctcctgggttcaggcaattctcctgcctcagcctcttgagtagctgcggttacaggcgcctgccaccacacctggctaatttttgtatttttagtagagatgaggtttcaccatgttggccaggctggtcttgaactcctgacatcaggtgatccgcctaccttggcctcccaaagtgctgggattacaggtatgagccactgtgcctggcttcactgtgtactttaaagctccccttttctccatccacttgctgaattgcctccatacagtctgagggtcttgctataatccattctctacctgggctgcagtaagcattgaaagtatatattaattagcggttattttccccgatatgtacttagggctttctatgtgctagagtccaaagtcagtgggtgagtgagtgggtgaatgaattattatttatttatttgtctgtttaagacagggtcttgctctgttacccaggttggayggcaatagtgcaatcatagctcactgtagcctataactcctgggttcaaagcaatcatcccacctcagcctcctgagtggctagggctacaggttctcagtctttgttatgctgagtgtggtggtacaggcgtgtagccctagctactcaggaagctgaggtctctgctatgttgcccaggctggtcccgaattcctggcctcaagtgatcctcctcccttggcctcccaaagcattaggatgagctaccatgcaaagtttgtgttcttaaccactaaaaaataagagacctctttaatcttcatatttamttctaaattatcttaatggtgctgagtcacaactttctggtggattgactgaaatataggaaatgcggagggaaatggtctattttatactagaaagggatacatattcaagtgatgaattgtgttatccagcaccattaaggataagaatttataacaatggaaatattaagtttctgtagatatttttaaaagcctttagagagcaacttttgagctctgaaactggtttcaggtaggctcaagactatactttaggactattttcaggttatcagagtttctttgcattcaatgccagatatttcctgagtatcttggcctagccagaccatcctaccactcctaaaatttatactacttctcctataaatctcccctataaagattatttttattggctgggcatgatggctcacacctgtaatcccagcactttgggaggccaaggcgggtggatcacatggtcaggagttcgagaccagcctagccagcatggtgaaaccccatctctactaaaaatacaaaaaatgagctgggcatggtggtgcttgcctgtagtcccagctactcgggaggctgagacaggagaattgcttgaacctggcagacggaggttgcagtgagccgagatcgagccattgcactccagtctggacaacagagcgagactctgtctaaaaaaaaaaaaaaaaaaaaaaaaagattatttttattactccacggttttttttttttaaacartgtgtgaaaagtcaggccctggaggctgaagttggaggattacatgagcctaggagttctactccagcctgggcaacatagcaagatgctgtctataaaaatcgaaataaaaaattatgtatgagaaaggcctccagatatagagggttacattcaaagaattgtacatttagttactttaatcaaggcagaaaaacagtgataagcttataatatttgcagtacaaagtttggattaaaaaaaaatccaaaaaaactccctcatttatttccatctgattatatacaatttctcaaataactgatgtgaaagtatgtggacaactaaagcgtacaatacatacttgagggattacttatatgttaaaattgtaaaacctcaaattatatagattttaaaaaatgcatagacatcctatttactccagagatgatacctaataacgaactcttaaaattaataacatattatgttagagaaagtcagcttttgtcttgatttggaaatgtctgctttgacatgactgatctaaaattgctctcttgagcacatctgtaatcccagcattttgggaggctgaggcaggcagattgcctgmgctcaggagttcaagaccaccctgggcaacatggtgaaaccccatctctactaaaaaaacaaaaaattagccagacgtggtggtgggctcctgtagtcccagctactcaggaggctgaagcaggagaatcgcttgaacccagaaggtagaggttgcatgcagtaagctgagatcacgccactgcaatccagcctgggtgacagagggagattatctccaaaaaataataatgataaaaaaaaattaaactgctctctcattataaagtcaggttcttgtttcagtaggagttaaaaaatagcttctcctatcctgatttgaggaagtgggggaaagtcctaggcctgtatgatacagggccagaattcagcaaaattactgtgcttctttcaaagcttcctttctacctgccagcatcaatacattcctttctcaaaagatgttttattttggtttttaataattaaaagaaaaaaactatcttcccttgtaagacttttaacacattatagtatctcagaagagcaggtaaaacatcaaatakaaaaaaaaaataaaatcttgatgaataattaatattatatatcttctacaatttgatacacaaaacaataaaaacttaattttaaccttaatactacctttagggacttttttgaacagcagaaatcatatctccatttttaattgtggtacttttatggaagcttctccaacttcttttgatatgtctactccaagaggacatctacatcataagcagacaaatcgtattatttatttgcttcatgatccatcactagttctgcagactatttgcttagaattctgatggtataaatatcaaatatttaattcatcatatgtggtgatgattcttaaatacttacaaatatactgggacctcaagtcaggataatgaaagctagtctcattaataagaaatctaaattttgagatatttttgaaagaaacagttttgctgttctcaaatactgtaaataagttaaaaacataaaatgaaatataaaaataatgaaaaatatcttataattctctacaaagctaaaaaggtaaaaacatttttgccacacagctaaagtcaaacctgtatccattcacattttagaaatgtcctaggtttctataggttcttctctgaagtttcaaaagctgccttgccccttttctaccatcctttgccattactagccaaagaggtcttagttcctgctgtctttttctgttcctcctcagtaactaatttttgcttcagatttctgcttttctaccatggtgtccaagataaggctttgctttgactgaatcccaacctggaaaaagccattatctccagcctcaacactgccacaagggggcataactgaatcagaggatatactctatctgagacaaggtatcaaagggatgccttccggtactactaactcaattcagttcattcatcatcagcatacatgtaattcatatatagcacaactgtcaagttacggaatataatgctgacaagttgtgttttttttttttttttttgagatggagtctcactctgtcaccggggctggagtgcagtggcgtgatctcggcttactgtaacctccacctcgaggattcaggcaattctcctgcctcagcctcccgagtagctgcgattacaggtgcctgccactacgcctggctaatttttgtattttcagtagagacggggtttcaccatgttggccaggctggtctcgaactcctaacctcagatgatctgcccacctcagcctcccaaagtgctgggattacaggcatgagccaccatgcctggccaatgctgacaagttttaaaacatcagatgaaacagtgttcaaaatataattatttatgaaaataattgtcttttactattccagaattaacttaaaacagaatttgatagtaatttgaaaaaccagccaggtgtggtggctcacacctgtcatcccagcattttgggaggccgaggtgggtggatcacttgaggcctggagttcgagaccagcctggccaatgtggcaaaacccaaaaactaaaaatacaaaaaatgagctgggcacagctgtgtgaacctgtaattccagctactcaggaggctgaggcatgacaatcacttgaatatgggaagcagaggttgcagtgagccgagaatgcgccactgcactctagcctgggtgacactaagactctaaaaaaaaaaagaaaaaaagtaaagaaaaaactgtgctattcactggaactttgatttgggagaggaaataaggcttgcaggaaacagctatctttcgkccaattctcaactgcctgtgtaagagcataatcacaacccactctcacacctgaatgctttctgcatgttttccttaaatttcccagcatacttgctggttctgagatgttcttgacattgcaaaagtccaggtcatggacatagtttacattctagttccaaaggagggaattcatcacccttactcatgacctgtttctaactcacctaaacttgccaagatttttataatttgatactgtagcaaaaatatttctcatatggtatcaaccttaactaggttcatgaaagaaatttatgtaactttccttcaagtaccaccagaatgtcaatgaaaacctcatatataaaggcaaaatccaggctttgtcttaagtaatgtaacttgcataaagatcatgaatgataccacatactttggttcatagcggatgccttctatgtcatgtaaaatgcccaagccagcacgtagtctttcaataccattcctaaataagaagcattaaaataaaatcaatagctccaagatctgaaggaagaaggcttagtatgataaaatggcaattaatatttacatagttatgagtgaagcacgtatatcctgtggcttaccatgcaatcataatgccattatcagtgcatagtctgggaggaggacacaacaaagtgcactgtgttgcrtttgttaaaatttccagagctctgcggatatagaagttacttgcgacaccaccagatgcaacctgaaggaattgagaaaaccaaaataactatcatatatggatatgaaccaagctgctaattaaacctggagaaaaatatcagcattaaacaataataaactatcccattttgagatgggtaatgggcagatgacatatctatgtaataaaaatttggaaagaaaaaaattactaataattctaatagcatacaaacattactagcatttttgtatattttcttccaacctttcatctaaatatttatttaatataatttcaatcatagtacactattttagaccctgaaatttttattattttgtgcattttactacataactctgaaaaaattattctttgatatccatgtaaaattccatctatgaattactaccatttaaacattttcccactttagtttataatttttaaatgaataaagtttaagatacagttaaacaggatgtttgtcaaggcttttaagcacaattaaagggattttggctggtacaatatagtggattatcagaactttatcaacattagtgtcacgaaagttggwataccacctcccactgctaaatttgactggcttattaaaaaaacaaacaaacaaagggatttcatcaaaggatgaaggaaatccacctatttttctaaaaatagtgatagcagttactgcatttactttctttattgtaagccctcttttaaatccaacaagaagatgcaaaattagacttatgtgccatagaagctatacagctgtcccataaagctaccaaactagtacaagaaatggctgttagtctttcctatcctgcataatttcatactgtcagggctagcataaggcataaagatctgttcatcctaaacacaaggtcaaggtcttgggaaaaaagtaacatattgcaaagtgtaactattactataaaatgagataaaacttaccagtactgcattattttgaggtaacaagtctctctgcttacaaaacagaatagcccgatgtgttcttttcacaagatgacatgccattgtgtgctgtactgtggcagcaatgtctgctgctgaagacaggatttgccccttctcaatacctgcagaaatgagcagctatttttaggcacaatccaggaatatttatctgttcaactttactaattagaaatataccttcctctttttcctttttcattattattttatcagtaacgtgttgaagtccagtaaaagaaaaatcacaatttttagcatgatgcaagggaggtttgatgtcaaaatgaaatctatttccttgtttggscaaatgttctatggctttcccaccactcatggtggagcactctggatgttttattaaagaaagtcttcttgccacctatcaaagaaacatattttttagagtcataaaattaaatactgtgaaacgaaaagatgcaaaggaaataaattgaaaattactaacaaaacaaaaaacccctgaatgaataaaacatgctatactttggcaaatatagactatagctgatattcaggtaagcagacaaccctgttccttatgatgacccgaacaataagaggccaatcactgcccctgtctatgtttgctcttctattggttggaaaatgggcttgaagttgacaataactgcttaatgatgaacgtcaataataagaacttgtcctatacttcctattatttcactgtgggaagcagtgttttgtttgtttgtttgtttgttttcctatatatggcagtagcctctgtagtattctaaaacaaaggggggtgcggggggaccctgtctgtggtgtaagtaattgtgtgatttaattctgtgcattgcatctttaatgtccttatgttaatctatatatattctcttattttaccttttttgcagtatgttagtttacgaagcacgttctttcacatacattatttggcaaaatacataactgtatctgcaaactatttcagcctttatgtacagatatgaacctcttaccattttattaagaaaggctaagaattataaaattgtgtactactctttctattttttctcaccatatgtgaatttttttcagtttactaagataaaattcagaaatatttaggtgaatggtggtagcacatctattgctacttagttgaaatggacaacataacaaaaaagaatggagaaattaattcttaattaccttgtcaagcatgtcacctggtgctatgtccaaagactttccaagaagcagaaaatctgaaactccttgaactaatgccaacagacagtgacctccagaaatcaaaagaactaaaaaaggaaattctactttattggtcaacctaatagtaagtgcatgagcctccatatgatgaatgggaatgaatggcttttttaactgtcctaccagctgtaagctaaatgataagcccactcccaggcttaaagcaagtcctggttttatggtagttgcaattgctgagaggtcacttggagagactccactggcagaaagagcttcttgtactattcgttgaatattttctctgtgaagctgttgagctgctggaggaacaatcccacctgttctgaaagaaagaaagacagcattttgtagttttaagattgtaaaaatgaagaaaaatgatattacagctaaaagcatgtcttcaagttaatcattatatagctgagtaagtcaagtattttctaattgtgtgccttctaacatagcacactatggttaaaactcagtaagcagtaattaaggggataatgtttctgactttttcartttatgcacaasagactcccatggatttgtttgttgacaaatgaaatcaccaaaataatcttgtaaagcattccatacaagttttgagcatgggaaggacaggaaaaaattgtatttaaggaaaattaatttccttgctgacagaagattttaagagagattactgcgaaagtatttgtgtaaaatgattatatcttaaactgggcgattgtgggaatggaaagaaagggacagagaaccttaagaactataataactaactgaatataaagggacagggggactaaggcatcaaagtttgttcagctattcagctggaatgaccgggagaaaagaaattctaaaagagaaacatgaagacagttttataaagacgacgagtttattttaaaacacattccacttgaggtcacagcaggatagcagatagcttgcaatcctgaaatacagtttgggaatctggtgctcagagtttgtaatttggatttttggtccatgtaggatggtggatggccactccaaatatcaagtgtaaagaactaagagacaaatttgctagcaacaaatttgctaccatgtgattgatttacaatatgagaactggagcaataaaatagagtctgcaaaacgcactgctagtttcaaaaaaaaatcatcttccaatatttgatgttgcaagatctactagttctatgtgtagaaatgaaaatcctcagtaagtgcattcaatgaatatttgctgagtaattaaaatattgtttcaggcaatgagggggatataaatgaaatgatctgatttcaacacatccacattgtaatataattttccttaattcttcaaagctactttttctcttatattcctcatctttgttagtggcatcaaataacccttgggtttcaaagttcatctttacttcctttctctccctcactctccgcatttaagtttatcaccactcccactgccaagtctcaaaagccctcatctcagtctgttcaacagtcttctaattgtactttcctaactctgtcctttgatccttagagcccatcctatattgctgccagagaatactctaaagcacatgctaccagttattcccctactcaaaacctttagtttcatggaatttgggagacatcaaatccaaattctctccctgcaactcatttcttccttctctgtcttgcctccctcctttcctttctatgccttttctgtgtattttatcttccagggattatgctaaacactagggccaaataagaacatggctttattctcaaagaattaataataacaatgtatttttgtctatgatttgtagacagtatggagtgtggattatggaacaaagctaacaaagaggcagggaaaccactgaggcttgaagctatagccaagagtctgtgcaaaagacaataagggattgaactcagtcagtgagaagggagaggaaagttgcaaaaaatatttgggagatggatttactatgaatggatgactgatttggatgtggaatggtgagggagaagtcaagggtgtccttcaggtttctggcttggaagaagggactcctcctgccaagtaatcctctattattgcattttccatgctgtttcacaatgatctgcttactgtcttcttcatttttactgatggtagtagtagaactactattgttactaagagctagcttgtattcagcccttgctattcaagaagaatgccctaaaagctttaaaggaattcacacttaatattcacaacattaatttgagttagtggtcattattatcattttacagataaggaaactgaggcacaaaaaactgtgcacagtatcaaatgtagtaaatggttgaaccagaatataagcctagtaaatggctgaaccagaatataagcctacactctaacccacttatatggtgagctgttcaaaggcaagagtcatatgtctcatttatatttgtatcccaaatgccctaagtattgcctggcagctataggtattcaaaaaatgctgagatgagccaggtggatggtatcactgaagcctgtttgcccagtagtctcctcaagtgacctatgctctagctaaactgaatgtctagtactttctcacttctttgtctttgctgacaatgctcacttagtgatatggtttggatctgtgtccctgcccaaatctcatgtagaatggtaattcccaatgttgaagatggggcctggtgggagatgactacatcatgggggcgtattttccccttggtactgtgtcgcgatagtcaatgagttctcatgagatcttgttgtttaaaagtgtgggccgggagtggtggttcacgcctgtaatcccatcactttgggaggccgaggtgggtggatcacttgaggtcgggagttcgagacagcctgaccaacatggagaaaccccatctctactaaaaatacaaaattagctgggcatggtggcgcatgcctataatcccagctattctgaaggctgaggggggagaatcgcttgaacccgggaggcggaggttgtgatgagccaagattgcaccattgcactctggtctgggcaacaagagcaaaactccatctcaaaagaaaaaaaaaagtgtgtagcacctcaccccccctctctcggtcctgctcctgccatgtaagacgcctactcccaatttgccttccgccatgagtaaaagctccctgggcctccccagaagcagatgctgccacgcttcctacacagcctgtggaaacacgaaccaattaaacctcttttctttataaattacccagtctcaggtatttcgttatagcagtgcaagaatgaactaacacaggttataatattctttccatctccattcactgaaggcctaacgaaaggccactgaacacctgtgatgtgtcaaacattgtgttaggcactaggcatagcatagtgattaatatagacatggcccctgtcaccttggcacttagactctactgagagagattatacatacacaagcaaatgtataaattgtgaaagtattacaaagaaaatatgcagggtatgatgatacagaataaataggatgggagtacctaatttagataaagtggtcagggtagtcctttctgtgccattaacttttacatgttcaaaagttcagtgcactcaggaaaaactgaaaggactgtgaagctgaggcacggtaataatagttactgtctgcaccacttgtttttccttatgctatgctgccttgcactattaattctccttgtaggtctagacatcatgtctccataatcaagttaagcttccttaaaccaaggactttgcagtacttcacagtgccttactaatatccaacacagtccctttcacatagttattgtttgaggctcaatctgcctctttacatacattatttctaatgccaccctcccgtaattctatgaggcagatgttaattttcctttttttttttttgagacagactctcactctgtcgcccgggctggagtccaatggcgcgatctctgctcactgcaagctccgcctcccgggttcacgccattctcctgcctcagcctcccaagtagctgcgactacaggcgtccgccaccacgcctggctaattttttttgtatttttagtagagatggggtttcaccatgttagccaggatggtctcaatctcctgacctcatggtccactygcctcggcctcccaaagtgatgcgattacaggcgtgagccacagcgcccagccaattttcctattttactgatgtgaaaacagaatcagagaggatatggaacttgcctacagttacagagccaataccaagtgcttaattcaggattcaaatacaggactgtgattccaaaataccaggctttttcactattcagatgttgtaaattgatagcttaaaggtatactcatctgtagagtattttattcttatttatttatttatttatttttttagtatttattgatcattcttgggtgtttctcggagagggggatttggcagggccataggacaatagtggagagaaggtcagcagataaacatgtgaacaaaggtctctggttttcctaggcagaggactctgcggccttctgcagtgtttrtgtccctgggtacttgagattagggagtggtgatgactcttaacgagtatgctgccttcaagcatctgtctaacaaagcacatcttgcaccgcccttaatccatttaaccctgagttgacacagcacatgtttcagagagcacggggttgggggtaaggttatagatcaacagcatcccaaggcagaaggatttttcttagtatagaacaaaatggagtctcctatgtctacttctttctacacagacayattaacaatctgatctctctttcttttccccacatttcccccttttctattcgacaaaaccgccattgtcatcatggcccgttctcaatgaactgttgggtacacctcccagacggggtggcagccgggcagaggggctcctcacttcccagaggtggcggccaggcggaggggcccccacccctaagacggggcggctgccgggcagaggcgcccccacctcccagacggggcggctgctgggcgggggcgccccccacctcccaagagtattttaatatattctaaattagctactaatgtaaaaaatctgcaaatacattaacaatctggatttccagcccggcgcggtgtctcacgcctgtaatccctgcactttgggaggccgaggtaggtggatcaagaggtcaggagattgagaccatcctggccaacatggtgaaaccccgtctctacyaaaatgcaaaaaatcagctgggcgtggtggcacgtgcctgtaatcccagctacttgggaggctgagacaggggaatcgtttgaactcgagaggcggagattgcagtgagccgagatcatgccactgcactccagcctggtgacagagtgagactctgtctcaccaaaaaaaaagaaaaaaaaaatctggatttccattttcccttgaaaattataataatctaataacacaggtcctgcattcccacatgacaactggctagagctgagtagtgacctcctccagacattttccactttttatcttgtccatttatttaggtaacctgcctggtagtcctctataaacatcacagtttataatccttgcaccattctatgctttaatacaacagtgtattattatttatttaagtactaatacaagttatatgtataaatatgaataggattttttttttcaatgacagttttcctaggacttcagctgagaccatgaaacatagaagtggagaaaagaaggaatgcattactgaaggaaaatcaataaatacggaagctgggaatgagctcagtttcttttggcaacaggattagttaaggttgggaccttattgtgaagacccttaaaagccaggatgaagtgtttgaggttttctatagcagttattaaaagtgtttgcaaaaaggaataagacagtagctcctgaaaacttttatatatgacaaatacaaaagaatgattttactttttccaaaaaagtggaaatgactaagataatgtctacttactttaaatgaacttcagtttgggaatgtattgcttctcccaacacatttccagtttcatccaccacagcagctgctgtatcatcacaactagtttcaattcccaatactattttatgaagaaatagtgttccaggatgaaaattaaaacttcttaaaaattcataaactttcctttttgatggtttaaaaaaaactcctgcagtcttagtcaagattagcatacttactctatagataattcctgaaaaagaattacagaaacaacttattatttgcaactgacattagccagcttatttttcaatatatagttttacagaattacaggaaagtttgtaaaagtcaccaaaagtttgtaaaggctatagcaacatgggaatataaataatattatgaatgaatataatgttctccaagggggaaaacaggggtcagatataaaattttttagtattattattacttgcatgctgttcctaccaaaagacttactattaagacagctaatataaagtacaataattgatagagtcctctgaaaagtgctatttattttttgacagctaaaattaagacaaaatgtggattttctaaaaagaatcaaacaacaaaggcagatggaacagataaaaatactgttaatgtattccatctcctaaaaacatctttcaaaataaaactggatcatttggttcaaaaacaagagttaacataaacacacacacgccaactgcaacctaacacctattttatccttaattgcaatctttggaattaaatctccactttttgctacaggttttgtcataacaaggatcttcccaaatccttttcccccaaaataatagcagcccatcactaaagcacactagtattttcacactgcgaagcacctaattttatgcccccagatcatccgttctaaaactttctgggtgttaaagcagggcctttctccaccacactaaagggacacggcatcccagggattagagatgagcgacctatttgcagaaggcagttgcgggcagtgcagcccagacagacacaacctagaggaattagatttgcattaacaaaatctggacaaggaggattgtacgaagcactaccctttcgggccaagaaagctgcaggctgaacccacgtgacttgggtagcgctggtctcctgtcggctgtaaggcggcgacgggcgcaaactggaaccgcttttccaggtgcgcaaaagcgtcagtggggtgaagagtgagcaatttcacccaccttccacttgggcggcagtagctagcacttgtctcctttccctactaaagactgtcgactgcccttatcgctgcaggagaaagcccgaacctggcgcccggaagtgatgtcatcggaactgtgcaaggtcccgtccagagctggctgctgttccgctagcgagcggcatgcttagtgaagaaaagcttaaaggccgtctttgcccaaaacgctctctgtgcgcacctgcatttcccccagatttgcaggtgatgagagttctgtaaaattacacagctagtgactgatccagcggaggccgaatacaggtttgtctgactacacaacatcaagttccaaacactaagctacattaaaaagaaattttttttttgcccttggctggaatttggttgctactgtgagaaaaggatggggtagattattcgtcattcatttttaagggaactatcatcaaatctaaacgtaggggtgaggtacctgatactttcatcggagaaataggatggaatctagcggcgccccctagcagggttaccaaagaacggaagtgtttctcatcggacagtgtaaaccgtttctcccacttcactaggaagaaaggggctggcttatttttacaattaaaaaaaaaaaaaatcgggagactgaggcaggagaactgcttgaactgggacccgggaggcggaggtagcagtgagccgagatcgcgccactgcactccagcctgagctacagagcgagactctgtctcaaaaaaaaaaaaaaaaaaaaaaaggctgtggtaaatattcagttgccttaaaccatcctattttcataatgcattatgttgtccttccttactatgtacatgaaattcagcatggtatgttttcaaagtcttgcacctgcttttttttttttttttcttttattggtttgtgaactttgttttgaacattggacagatttattccaagagtcaggcttttcccctgctggtatttaagattttagtaagcaaggaccttagaatccactgttgtacagggctggcatatatacctgcactttgcacgttgtgaagctctgggtataaaagatgagtaaatcccataacaacatgttgggaagccacagagtacagtctagaggtggatacagataaataaataaataattaccagaatatggttgaggttttttatttggaacttatgtttttcaaaaatttcatttatgtgtaacaataatgataaagtggcactatgtaccaggcacctgctgtagattaatttctttcaaaatcccatgaaatagtttctgtcctcattttacaggcaactgggccacagagtttgggtgctttggaggtcacacaactaggaaaagcaaagctaggattagaagtcaggccatctggcactggagtctgttttcttaactgctagaagagaaaataactcacattttctctagggtgcactgttggcctaaacaagggaaaaaagaaaaattaaaacctaaaagttaagaaaaattagtcatacggttagagaggtcagagcttatttctgttatacactggaatccagtttgaacataaaacctttcacatcaggtattatttttcttacaattccaattatgttcagcaagtatatcccaatgctcttctgtgctgtcaagacaagcaagatcctattgtgtgtgctatcattggtagattcctcgtctaggcactcttggccagtgttgagtccgaatgctgttattatgtgaaacaggagaactctagggcacattagtatggaattttatctttcccttgaccgaatatatgtaaagtggcacttatacaagtcccatgtatttagcaaagatatacattttttatgttctctattgtaacataggagagggttattgggggaaaggcatgtatgctctctgaggcctgtctgtacttttatgcagatagttagaatgccactcatgggcattctcaaaaaatatggcctatgtaagttcaacataaatcgagagttccagctgaatctagatatgcttatttggtctcagatattgtgtgtctagctttccatttgtagccttcagaggaaaattttattattaatacatattatatattaaaacatataagaatctttctttttttttttagatggagtctcactctgttgccaggctggagtgcagtggtgccatctcagctcactacaacctccacctccggggctcaagcgattctcctgcctcagccttccgagtagctggaactacaggtgcctgccaccattcccagttaatttttgtatttttagtagagatgacatttcactatgttggccaggctggttttgaactcctgacctcgtgatccacctgcctcagcttcccaaagtgctgggattacaggcatgagccaccacgcctggcccaaatcctatttttcaatatttatttcctaattatgtcctactaggttaggttttattttcatttgttacatatttattgggttatttcctttatgctaggaactttattagtataaggatacagataaggtccattctctgttctcaagaatctgagtctacaggcagaagacaaaatgcagtacagaattatggaaatgtgaatggaaactgcattcagagaggggtattgcttgggaaaagccacattggcgtgccacagatgtatgccagcccggcaggcccatagtgtgattacttgagtttcaatatctgattcttttataggcttgaaattggtttatcaggtctggaagtgactggactctggagtactgagttacccaccacaaactgctaataaaatgctgtgtaaaagccattaatactaatgtattatttatgagaaacacaattatggggaagctaggatagttgagtttgctggtcattatcttccttgtattgaccaaattacaatgaaggctaaatccaaattataatcagaagattgcttggtaaatacagaacagaaacaatagaaatgtgtgtggtgcttttaatggctagtatttcaagcctgatgcagccctttccacttgagtcacattgtcttacattctttgacttggctagtgctaaaaatacattgccattttactttctccatttttttttttttttttttttttgagacgacgtctggattgcaatggtgtgaggttggctcactacaacctctgcctcccgggttcaagcgattctcctgccccagcctcctgagtagctgggactacaggtgcacgccaccacgcccagctaatttttgtatttttagtagagacggggtttcaccatgttggccaggatggtctccatctcttgacctcgtgatccacctgcctcggcctcccaaagtgctgggattacaggcgtgagccaccacgcccagcccatcctttctcctcttaaattttctttgctgaccagtatctcttgatgtggaacgttctttcattagtggtaatactgtcaatcaggtctttggaagatattttgggttttgtttgctgaaccattatgcttattttacaaattaacttttctgaactttattgtggtagaatttacataacaatttaccattttgaccatttttaagttcaaaggaactaagtacattcacattgctatgcaactatgactaccatctagctccagaaccttttcatcttctcaaactgaaattctgtacccattaaacaataagctcccagccgggcacagtggctcgcgcctgtaatcccagcactttgggaggctgaggtgggcggattacctggagtcaggagttcgagaccagcctggccaacatgatggccatctctactaagaatacaaaaattagctggttgtggtgatgaatgcctgtaatcccagctacgtgggaggctgaggcatgagaatcacttgaacctgggaggcagacgttgcagtgagctgggattgcaccactgcactccagcctaggcaacagaaggagactcccgtctcaaaaaaaaaaaacaaaacaaaaacaagaaccaataagctcccattccttctgccttccagcccttggcaaccaccattccactttaaatttgattattctaggagttcataaaagtggggtaacacagtatttgtcattttgtgactgacttatttcacctatcataaagtcttcaagattcatccaagatgtaatatatatcagaagtttcctcctttttaaggctgagtaatattccattgtgtgtatatgtcacatttcttttaaccattcatcccttgatggacacttggattgcttccaccttctggctattgtgaatgctgctgctgtgaacatagatgtacaaattatctgtccaagttcctgcttttacttcttttgggtatatacccggaagtggaattgctggatataattttaatttttgaggaatctccatactcagatgatcttatttccttattt

SEQ ID NO: 97421 - DNA, 16747 bp, Homo sapiens
cacggcctgtaatccaagctactccagaggctgaggcaggagaataggttgaactcaggagacagaggttgcagtgagccgagactgcaccactgcactccagcctgggcgacagaacaagactccgtctcaaaaaaaaaaaaaaaaaaaatcttcctgggtattctctctgccagctctctgccccagcttgtccacgaccttctcctcaatacacaagtgtgcacccctgtccaatctcccacttaattcacaggacagctctagatctctgcttacttgccagacagagacagtcagacacctggaccgtggcacccacctgtccaacctcgcccagctcagatcaccaacctcatcgatttccttgcaaaacttttgacttccgccttggacttttgccccttaaaattttatctctgcagagttagaatatgacattgctttgtcgataccataataataaggctacagtaaagggagagctattccctcccaaattacattttctctagattgggccactcttgccattttaaactttcatttatttacttatttttattatttttttttgagacagcgtctcgctctgtcacccaggctggagtgcagtggtgcgatctcggctcattgcaacctgcgcctctcaggttcaagcgattctcctgcctcagcctcctgagtagctgggattacagacatgtgccaccatgcctggctaattgttgtatttttagtagagacagggtttcaccacgttggccaggctggtctcaaactcctgacttcatgtgatccacccgcctcagccttccaaagtgctgggattacaggcatgagccactgcgcccagcctcatttctggtctctgttcctgcttttcctgctcggcgagccacacagctagaatcatctcaccagccagggcctctgcccgtggttcctgtgcagctctggagagctgctcttcccatccaaaggtcttcgatcccctacagtccacagttcccagttctcccctccacgtgcatggaagcaggacaccccaatctcatctctttttttgtttcttttaagaaaccaggtcttgctctgttgccatgctgggagtgcaggggtgcaattagagctcactgcagcctcgaactcctggctcaagtgatcctcctgcctcagcctcctgagtagctgggactacacgttcaggccaccacatctggctacattttaaatttttttttttgtagagagaagctcttgctatgttgcccaggtggtcttgaacccctggcctcaagtgatccttttgtggcttcccaaagtgctaggattacaggagtgaccgctgtgcctggtcgtctcaccttcttttgacatggagccccagccttgggaggcagatgctgaaccgtgtccacagtgcccccttctggaaattctccacaagccaaggttttggacagctccaatgtctggggctatggcatttcaggcgggaagtctctgcagagagcagtacctgccttcatcccttcctagatattaattcactttcagacacatactgagcagctagtgtgagctgttacggtgctggctctgcagacagagctgcagcgaagacagacgccaaccccaccctcacacagccaatcctgtgctagttttttctgtagaaccaccactgggtttccagttggtctgggttatctggtgaactcagagactttcgctgtcttctggacactccacaacagtccaatcacctgcggggaccctgacctctgcaaacctccggggggtggttccttggttggccgccctcctctgacggctccgcctccctgccgagccctgggatcgtcctccctggctcctgccttctctctcataggatctcatttgttctgacacacttattctcaagcccagtagttactcttgaatattgcttatagaggtgtgtttccttgaatattcaagcatatgtgttatgtaatgggtaataataaagtaggaatgtgcatatatgaatcagcacaaaataactaaaaaaaatcccatttccaaagtcactgactattgacaaattctggacctacttctccgtttgttgtttttttttttttttttttgagacggagtctcgctttgtcgcccaggctggagtgcagtggcgtctcggctcactgcaagctccacctcctgggttcacgccattctcctgcctcagccttccaagtagctgggactacaggtgcctgccaccacgcctggctaattttttctattttttttagtagagatggggtttcaccatgtcagccaggatggtctcgatctcctgacctcgtgatccacccgcctcggcctcccaaagtgctgggattacaggtatgagccaccgcacccggcctatttttattttttcttgagacggagtcttgctctgttgcccaggctggagtggtgtggcacgatcttggctcattgcaaccttcgcctcccaggttcaagcgattttcctgccttagcctcccgagtagctaggattacaggcacacactaccatacccggctaatttttttgtacttttagtagagacagtgtcttgccacgttggccaggctggtgttgaactcctgacctcaggtgatttgcccgcctcggcctcccaaagtggcgggattacaggcgtgagccaccgcgcctggcccagattctctttttataaaattatgattgtatcacttaactatttcttctcgacagttgttatacacaaaggcagtagctcattcccctaatggatcccttacttagctatcacctcataaacagtttccagctaatgagtgtaatatacacagcagccacaaatgtctccatgcaaattttttttttcttttttagacggagtttcactcctgttgcccaggctggagtgcaatggcacgatcttggctcaccacaacctctgcctcctgggttcaagcaattctcctacctcagcctcctgagtagctgggattacaggcgcctgccaccacgcccggctaatttttgtatttttagtagaaacacggtctcgccatgttggccaggctggtcttgaactcctgactttgggagatacacccgcctcggcctcccaaagtgctgggattacaggtgtgagccaccatgcccggcttaaaaatttatttttgacaaatgcaagtggttttattcctttttttttttttttgcattttactaggaaacagcctgtgtgtgtttcctcccggtgcacagcctatatggttctttgaccaaatggtgtcttagtcactgcatctgttagagactcagcttctcatcaaatcagttctatataggctgggcgtggtggctcacacctgtaatcccagcactttggcaggatggtggggggggggggggcggtggatcacttgaggtcaggagttcaagaccagcctggccaacatggcgaaccccgtttctactaaaaatacaaaaattagctgggtgtggtagcgtgcacctgtaatcccacacaaaagcttgcatatccaatgttcacagcagcactattcacataggaaaggcggaagccacgcaagcgtctatcgatatacgaatgaataaggacagggaaaacgtggcccctccgtacactggactgactcagccctaaaggaacacagcgctcatacgtgctatgacgtgggtgtggccttgaaaacaccgtgctgagtgaaagaagccagacacaaaggtcccatgttactgatccaatttacaggaaatatccagagtaggtaaatccacagagacagaaggtagatgaatagttgcttagggcttggcagggaggggtcagagggcaaaggctaaagggtttggggtttcttctggagatcaaaggttctaaaatggcctccgggccaggcgccgtggctcatgcctataatcccagcactttgggaggccgaagtgggcagatctcctgaggtcaggagttcgagaccagcctggccaacatagtgaaaacccatctctactaataaactacaaaaattagcccggtgtggtggtgcacgcctgtaatcccagctacttgcaaggttgaggcaggagaatcgcttgaacccaggaggtggaggttgcagtgagccgagattgtgccactgcactccagcctcggtgacagagtgagactccatctctaaataagtaaataaaatggactctggtgatagacgtgcaactctgtgaataaactgaaagccactgaattgcgcacttgaacgggtgaattgtgtagcacgtgacttaccaagagagctgctacacaaaacaaaacacagaacgcattcatcaagtgagcttgaaagcttaggaacatcaggccgggcgcggtggctcacacctgtaatcccagcactttgggaggccgaggcaggcggatcacgaggtcaggagatcgagaccatcctggctaacatggtgaaaccccgtctctactaaaaaaaaaatacaaaaaattagccaggtgtggtggcgggcgcctgtagtcccagctactcagagaggctgaggcaggagaatggcgcgaacccgggaagtggagcttgcagtgagccgagatcctgccactgcacttcagactgggtgacagagcgagactccgtctcaaaaaaaaaaaaactcaggaacatcagcctgggcaacaaggggagtgtgggtggtgatggcagcctgaggcaggagaatcatttgagctcaggagtctgagactgcagtgagccacaactgcaccactgtgctccagcctgggcaacagagtgagaccctgtctagaaagccaagaagcctaggaacaggttttttagttttaaacatattacttttttttttgagatggagtctcactctgttgtctaggctgaagtgcagtggcatgatctcggctccctgcaacctctgcctcccaggttcaagcgattttcctgcctcagcctgtggagtagctggcattacaggcacccgacaccatgcccagctaatttttgtatttttagtagagattgggtttcaccatgttggccaggctggtctcgaactcctgacctcaggtgatccacccacctcggccactcaaagtgctgggattacagccatgagccacagcgcccagcctattattaagccaaggctgacttctcgattgtttattccatgtataggagccccttgaagacatctgagagttcacgccacaggctgtgtttgagcacagggctctgcctgggtgggccagatggaggtcagtgacatgagggagctgggtacattgggagctgcccaggggtctggcaggagaccaggaggcaggggctgtaccaagaggacgggccagaggcagaggaagctgtgctgtgagtttccagggtgggcagtgacctctgattgataacctgaccccaaatggaaacctggacggtgccctgactgctgtctctgctgctgttctcttcccaggatggaggccaggggcatcagatgcaccttccctcctccgtcccaacccagggcctccagctaccctccccctggcctcactctgcagaggagcctcttctaacctgcccacctcatctctccttctccccttgcccactctggcccttccgtcctttcctgaggccaagaagtgggagcaggagggaagtgagggaccggctccaccaccgaccttggagtgtggagctgacaggtccaccgggctgtgccaggcctgaggctcctctgtgatcaggcagtgggcaacaccaagccaggcctcttcagagagaatgctgaggacggggcaggagggtgcccagggagccacgccgtggcggagcctgactgtgctctgggcggcccactgcctggggcaggggagacaatcccatcctcatgcctcctgggaaagcagcaccaggcacacagccaagcacaaaagacgcctttattggtgcccagatctaaagggcaggatgggctggtgtgaaratgacgtggaagatgacagtgcttcccctyttcccctgggagtcagcctcttcccctctggcacggggcctagggttgggggctctaractcaracccccacagcccagggcaggggaagggtcttgagcttggtcgtgttttcctcctgggccaatcacagaggcaatagtgggagtcctggggaggggcatggctggcgtgggggtggggcctggagccctcaatgcagcaccctgcaaaccccaggggcagccccccaacctgtgcctggccctgcagggtcagctaaggcacagtggctgggtcctgtcctgccggaggccagagcactcccggcgacctggccctctcaggacgtgcagctgggagaacacagctacttctttcgccgggtggtcctcgaactactggagcaggggttgggggctgcggtggcctgttcggaggcagctccggastctttctgggaggctggcctgcgcttctccccgctgactggtgccagcggggaggaccggagagaacagggtgctagcagggcctgcacaaatctgacagcccccacggccatgaggagcccccagagcagggcgggggcctccaggggagacagctgagagcgagtccagtggagggcctgggccagggtgctgttggcgctgcgggtgcgaggtgggyttttctcctgtgggagggagggagggagggaggttggggaagtgcttactgggtttaccccgggaggctggggtcacccctgccacctcccccagcctggctgacacccccttacctgtagtccaaactgcctgagcagcgtctccagcgtggggtcccccagggacacggatgggaagaactcctccacccactggcgccgccaccactggctgcagcaggacccgatgttcagaagctggaggcaccccgggctccataccccatcgccagtgcccagccttacccctgctcctcagctcctcacgctccacatccccccctggtgcccggccttacccctgcaccccgggctccacaccccacccggtgcccrgccttacccctgcaccccgggctccacaccccccccagtgcccggccttacccctgcaccccaggctccacaccccaccccggtgcccggccttacccctgcaccccgggctccacaccccccccagtgcccggccttacccctgcaccccgggctccacacccccccccggtgcccggccttacccctgcaccccgggctccacaccccccggtgcccggccttacccctgcaccccgggctccacaccccacccggtgcccagccttacccctgctccccaggctgggagaaccagtacttgtagcgctgggctcggacgtaggtgggcggctgcttgtggaagggatacctggccacttggctctggacaaggcggatcactgcagcgagaggcatcagcgtggcccccacagtacccgccctgcccctcccctccccaccccgctccaccccagcccactccacaccccccaagcccgctccgcacctggctccttgccctgmagcagrcgcaagaccaggcttgtgaaccacgggctgtgcgtgtgtgggcccagggctgcaaaccacatctgccagtccaggcgtggctgrtggggcaccacaaccgggggcggccggctcaggttcccaggcttgtacatgaactcgatctcctgccaggcaggccgaggtcagctgggcccgctgacctgggccccaccaccctgcccgccctgggagggctcaccrtccagtggtggccgtcgtaactgccctccagcaccacctcaggccgtccaccaagcccagtcatgcggcggaagaggccgtaggagttggccagctgtaggtgctccacggcaccaaacaggcggtgggccccggtccagaggcgcccgtgggtcccgggctccacgtaggagtacggcacctggagacargtgggaggttctcagggctgccctgcccccagcccatcccccagccctgcagcgctacccaccaggctaatcaggaacaaggccacggtcgcagtgcccacaagggacagttggactacagcactgagcttccgtagccagccccgcacctgggtccacctgtgggcaaggacccaaggtcgtcaggccggccctgcacacctgtgccccctccctgcttcctgggccatgtacctccacagggcactcagcagctcccagaccagggaggccacacccagccacacagtgggcagcgtcagtgtcttcagccactgagaaaactggtggaaggtgaaagctggtggasgaggggggtgtgaggactggyccgcccctgccctctggcccccccaggtcggcactcactggttctggagtggatggtgcgctgctgccagtcaacctccaggccaaagtagtgcacagtgccataggccagaagcccgtagacggctagttccagcagcagcgacagggtggccagcagggccttgggccaggctgtggggcaggacagycatgggtcagcagagggtccccagccagggggctggggtgcagctagagtgggagtcctgtrggggtgttggaggggagaacccctgggagggcagggggctggacaagtgacacgcacaggtggccgtcttcttgcggctgccrtggccaggctcagcagccaggtgctggtcgtccarcagcgcagtggtaagcaccagcgtcatcaggttgaaraarttgtagttgccggtgatgataatcaggacctgcagcagcacctgggggcggcccgctctcagtgctcccggagactgacgcctggccccgtggcaggcacccacctccaccctgcagggtgcatycctctgctacaaggccttcccaacagcggttgccagctgtccccgggagccaygctgtccccaacagggcacgctgagcagcgctgaaggccgagccctgtctgcctctctctgacagctgcggccctcacccacctgcgagtagaaagcagccaagcgcaggcgtcgaatgggggcgaagaacaggggcggcacagcgatctcaattaggaaggtggccaccacgctgagcttgtgcagccagaccggcaggtggtgtgcgaaccaggcggcgggcgtgggcaggcactgggtctcgtagtggtaggtgagggctgcaggcgagggcaggagtcagggctggccgagcccccagactaccccaggtccagaccgggcccctcaccagtgagcccccaccacgcagggcagcggctggtcagcttgaccacgcctgaggcgaacatgaggcggaacagcagccatcgcaccagccagaaggggaggtcttcgtggggcagggcccctgcctgcctgccctggggggcctccttgcggtgggaggctggcctcagcggggccaccagcacggccaggaagccagtctctagcagcagggagtccctatggggagagcaaatagcaccaagagcccctccccacacagctgcttccctcggaaagtcctcccaggaagggcagagccctcccccaccccctacccagcctcccacagccccaggcccagccgtcactcaccactggaaataaaggaacacctggcccacctgcggagagaggggctgtcagggagcgggtgtgtctgtggactcaggtaaggtagaggcaggggtgggtggtgggggttggagatagagtgagctggtcacaggtcccacttgcctggcaggctgacaggtaggcggcccaaagcagcaagtagatgacrgggtggcgcagtgggctcagcagcagggctcccagggccactagtgcacccagcaggctcagcagctccaggccctgggccgtgtccagccccagtctcggcgcttcccacagcagcgtcggggtctcccacagctgctgccagcgccccttgccctgaggccgcagcgtcctccttgcaggtaggatgccctcggggccatacaggcctgtgggagggcatgtcatggccaggccctggacagcccttgcagactagactacctctgagtcagggcctgcagatcccccagcctaggtcagagcatgcggatacctccatccctaggtcagagtctgcagtccctccagagcccgtcccccaggtcgggacctgtcaaaaccccgtcccagggctagaggcctgctcaactacctgagtcagggcctcccacccagcagagcccactgccctcttccaggtctcagcccgatctcctacctgtcccaccaggtctgggaggaagcctctctcccacctctctcagagttctgtcccccaccccaggtcagagtccagagccttacgggaaatggatcaccgcacaccttcctacccccacagcggcctgcaggacacgaaccgccgccccctaccccacgccaaggcctggccctcactcccaaccccggactgcgtgagtgccgggcacagagaaaagaggacatagggtcccgcgccgaggctgggggtgtcccaccctgggtgccttcacctgggatttgcgtgtagagggaagcgaaagcaaacatgaagacggccgccacgccctggaggaagagctgccgcgggagccgggagcccgccatgtccgctacgcggcccgctagagcagggcccgccctccgcgtccgcccgcccgcggcagccccaggccccgcctcctcaccgccccgcccgcccaatccgtggcagccccaagccccgcctcctcggcccgcccgcccgcccgcggcagtcccaggccccgcctcctcaccgccccgcccgcccaacccgtggcagccccaagccccgcctcctcggcccgtccgcccgcccgcggctgccccaggccccgcctcctcaccgccccgcccccccaacccgtggcagcccccaagccccgcctcctcggcccgctcgcccgcggcagctccaggccccgccccaccccgccccgcccgacccacggcggccccaaaagccctcccgtccaaactggtggcagcccaaagctccgcccaccccccccctcccggaggcttcgaccccgccccgcgactcttccggtgagctcccgctgcgcggcgccggggttcgcctctctggcttttgcccacgttacgtcatagacatgcgcgcgacgccgcgcctacgcattttcctgggcgggaacagcaaaatggcgccagaactagtggcgggctgaggacgccgtacccctcggaaggcagccctgcggtccctttgccgcccgttccctcccggacatggaggacgtggaggcgcgcttcgcccacctcttgcagcccatccgcgacctcaccaagaactgggaggtggacgtggcggcccagctgggcgagtatctggaggaggtaagggcggcgggggagtgacgcggggtgggccggcgggtggggctgcggggcgggggctccgggcccggggctgtgggcgccccaccgcctccacgcctatggctatctggcgctctggccgcgcaggtcctcgggctccctgcttcttttcaaactccatctctgcctccccaaatcatcccttgttggattagcgtggacctgtcattgcaggtttctacccgtcagcgagccgtgaatgattgagtgggtggtgaccagccgtttctctaacgtagtggaatagactagaaagcattattgcttttattgcagttattgcgagcatgcttgtgtgtttgagaggtctggatcacgatgtcagaggaattttttatcttggattttcaaaccaatttcaagctattgccatgctctatcctgttagcgattagtgtttcttccatgtttgacagccctgtctagacctgtgttaagctgtctgctccatatttgcgcttcatttttactcctcagcccagctcagtctggcgtccacgacacttaaatgtttcttgtcttgatcagcagtgatctccattctaccaaatccaagggacataagtcagcatttgttggactggccactcctttctttttgaaacatggtggtaggattttttttccctatttcattgcctgatttttcttttctatccagtctctaagtgttgagttcctcaggatggggcctaggtcatcttctgatgcatttaccctgaagtgtcatttatttctatgattttaaatattgcctgtattaggacaactaccagatctgcagctccatcctagatctttcctccaaatctactttacatatccagctgctctcttgacatctagtgggtgtcacgcaaacatctcatttaacatatttaaagtggaactcttcatttttctgcttaaaccccagcttttcccatctcggaaaatgacaccgctgttcaaccaaaagcaaaagctaaatgtggctatagtgaagccccatgcttaacactcagttcatccatgaattccatcagttataccaccggaatatcacttgaattcatctgttgtccattttatttggtctaggccaccattgtctctggcctggatttgtgtaaaaccttcctatttgggttcccttatccctgtttttgtcccgtccaattcgtgctccaaccagcagcaagtgtgactcttaaaaattaaaatctggccacagcactgttttctgcctaaaatcaacccctcagtggctttccattatgcccagaataaaacccaaatttccttctctgaacctggctctgctctccattttagcctcattttgggctgttttgtatcttgttcttttgaaccagtcaacctatggcccctccaagctttttcttggtggaagatcttcatgctttctgcccccacttgggaatcttcttttttgtttttatttatttatttatatattttgagacggagtctcactctgagacggaagtgcagtggcgcgatctgagctcactgcaagctccgcctcctgggttcacatcattctgcctcagcctctgcagtagctgggactacaggcgcccgcctccacgcccaactaatttttttgtattttagtagagacagggtttcaccgtgttagccaggatggtctcgatctcctgacctcgtgatccgcctgccttggcctcccaaagtgctgggattacaggcgtgagccaccgcgcccggcctcttttttgtttttaaataaagagggacttcatatggcaaggaaaaggagaaaaaaaaaatcagagaggaggatcttactgtgttgcccaggctggtctcaaactgctgtgctcaagcagtcctcctgcctcagcttctcaggtagctgggactatagctgtgcaccaccacacctggctgggaatattctttcaatgactgagtttgttttcttttctttttttgagatggagtcttgctctgttgcccgggctggagtacaatggcagaatcttggctcactgcaacctccgactcccaggttcaagcaattctcctgccttggcctcccgagtagctgggattacaggcatgcaccaccacgtccagttaatttttgtatttttagtagagatgggtttcgccacattggccaggctggtctcaaactcctgacctcaggtgatccagccagctctgcctctttccaaagtgctgggattacagacgtgagccaccacgcctggctgactgagtccttttcattcttaaggtcttagtgtaaatgtcagctgaccaccctatctaaaatagtcctctccatctcagcaccttacacactttagaatgtttatcataaaccatttaaattttttttttttttgagatggagtcttactctgtcgcccaggctggagtgcagtggcatgatctcagctcactgcaagctctgccttctgggttcacgccattttcctgcctcagcttcccgagtagctgggactacaggcacctgccaccacacccggctaatgttttgtatttttagtagagacggggttttaccgtgttagccaggatggtctcgatctcctgacctggtgatccgcccgtgtcggtgtcccaaagtgctgggattacaggcatgagccaccgcgcccagccaaaaaaaattttatttatttatatgttttttttttgagatggagtctcactctgtcacccaggctggagtgcagtggtgcaatctcagcttgctgcagcctccaccttctgggttcaagcagttctcctgcctcagcctcttttttttttttttttttttttgagacggagtctcactctgtcgcccaggctggagtgcagtggtgcaatctcggctcactgcaagctccacctcctgggttcacaccattctcctgcctcagcctcccgagtagctgggactactggcacccgccaccacgcccggctaattttttgtatttttttagtagagacggggtttcaccgtgttagccaggatggtctcgatctcctgacctcatgatccacccgcctcggcctcccaaagtgctgggattacaggcctgagccaccgcgtccgatcctgcctcagcctcttgagtagccgggattacaggcgcctgccaccacgcctggctaatttttttttttttcttgagacagagtcttgccctgtggcccaagttggagtgcagtggcacaatctcggctcactgcaagctccatctcctgggttcgcgccattctcctacttcagcctcctcagtagctgggattacaggcgcccgccaccacgcctggctaatttttttgtatttttcagtagagacagggtttcaccatgttagccaggatggtcttggtctcctgacctcgtgatccacccgcctcggcctcccaaaatgctgggattacaggtgtgagccaccgtgcctggccccagctaatttttgtatttttagtagagatggggtttcaccatgttggccaggctggtcttgaactcttgacctcgtgatccgcccacctcatcctttgaaagtgctgggattgcaggtgtgagccactgcgactggccacaagccattcttcaactcatttacctgtttgtggcctgtctccaccctagaatgtgaattctgccagggcagggaccatacttatgccctcttttgtctgcttagtagagtgcctggcacataggtgtggacgttaaagtgtttgttaaatgcacatgtgatctgatgaccaaacttctctgctctcatgcatagttggctgagaaaatacggggaactgtgctgggcagagctcctgtggattcaggttttcacatcaagcagggtccatgaggacacctgttcacttggtaaatctccttcctggcttggtcagctcccttcctgctttcttatgtctgctcttccaaacctctgcagcttgaagtcctgatttcctggtttctagtattatctttttccttctgtcattttccacacactaccatgatgttctttttcttttttttgtcctttgtttttttttttttgttttttttttttagataggttcttgccctgttgcccaggctagagtgcagtggtgcaatcatggctcactgcagcctcgatctcccaggctcaagtgatcctcccatctcccaagtagctgggactgcaggcatgtgccaccgcacctggctaattttttgtatttttggtagagatggggtgtcactgtgttgcccaggctgttctcaaactcccaagctcaagtgatccacctgccttggcctcccagagtgctgggattataggtgtgagccattgcactggccagaatgttcttctagtactgtcatgatcctactctcttttatccatttatttattcattgttgttagttgtgaattgtgtgccaagaaccatgttaaactttgaaaaaatagtgccaagcaaagcaaatgataatccccactatggtaggacttcctctgtcatgggaagacgggtccaagagagtaaccgcatgggggtgtaataaatatgcatttggtgtttacttgtgttaagcacctgttttatgtgctttacacatatgaatgcagagtcctcacaaaaaccttgttagtagaggcgttagagatgtactctgaatgatagtggttcctggcagatcagaatccagcctccacccctgcgtgtgactttgtgtagtcagaaactgatggccaggcgaggtggctaacgcctgtgatcccagcactttggggggccaaggtggctcacgcctgtgatcccagcagtttggggggccaaggtggctcacgcctgtgatcccagcactttggggagccgaggtggctcacgcctgtgatcccagcactttggggggccgaggtggctcacgcctgtgatcccagcacttagggaggccgaggtggctcacgcctgtgatcccagcacttagggaggccgaggtggcttacgcctgtaatgctagcactttgggaggccgaggcaggaggatcatttgaggtcaggagttcgagatgagtctgaccagcatggtgaaaacctgtctctgctaaaagtacaaaaaaaattagccaggtatggtggtgcatgcctgtagtcccagttacttgggaggctgaggcaggaaaatcacttgaacctgggaggca

SEQ ID NO: 97422 - DNA, 20918 bp, Homo sapiens
  misc_feature (1)...(20918): n = A,T,C or G
gagccgggggagggccgtggggggagggcgcgtgcgggggcggggccgcggcgcagccaataggcgggcgagccctggcgatgggggcggggacacagggggcgcggcctggcactgggggcgtggcccggggggagctgaacgacagccgggggttcgtcgcccggccctgacgccccccgccacctaggtcatcgggcttctggacgtcttcacgccggccacgtccatcgaggacttcagcgaagtgtgagcggcggggcgggcgaggcagcggggagcgcgttcgcggtggggcggtggggccctgtcctgaccccctgaccccgccccaggtacttggtgaccaccctgatgggcgccgacctgaacaacatcgtcaagtgccaggcgctgagcgacgagcacgttcaattcctggtttaccagctgctgcgcgggctgaaggtggggcgccctgggcttcgcgggtcctctcgcaggggggcgggcgggccgggcccggcgctcaccacaatccccctcccgcagtacatccactcggccgggatcatccaccgggtaggtgcgaccgcagggtgagggtcgggtccagcagggctccgtcccagcctcctgtgctcacgctccgcgtgacctgcaggacctgaagcccagcaacgtggctgtgaacgaggactgtgagctcagggtgaggcccgtgggcaggggtgggcagggcggcggcggagcccgtgcggagcttgagaacaccacgtggtcgccccagatcctggatttcgggctggcgcgccaggcggacgaggagatgaccggctatgtggccacgcgctggtaccgggcacctgagatcatgctcaactggatgcattacaaccaaacaggtgcagggggaaggccttggggggacgaaggccaagggcctcgtctggccctcgactgactctgcatgccaggtcttagggggcaggcaaggtccccaagaatgtgggacccacattcaaaagtagcccttcagaggccgctagagcatgatgggtgctggcctcctctggctgtgcagctatggacctccccctgcctaggggggttgggtatggcagaggagggggtctgcccatcttggggtctggatgtgactgtgggtctcctggaggagggacgtggggtgggcacactgatggaggtcccctcgccctcgcacagtggatatctggtccgtgggctgcatcatggctgagctgctccagggcaaggccctcttcccgggaagcgactgtatccttggcccaggttggggagcagggtcaaacagggcccctcctgtagggtagggaccagcgctggccccttctggcgggtcttgcctcctctgccccccatgctatgctactttgggctggccatcctcacctataggagagcgggctctgggcagcgccccaaagttttgggtctgggggcccaggaggggtctgtggctggcccgtgggtgtttcctgagtgacacagacattgaccagctgaagcgcatcatggaagtggtgggcacacccagccctgaggttctggcaaaaatctcctcagaacacgtgagttggtgcccgccagccagcagctccctctcctggctgagcccccaggctctctgggggagagggtggtgtggaaatgcggggaccatatggggaacatgggatgtggtgggatagagcctagggcaggtgcccaatccctgcaggggaaacaggagaagggggaagacattcctgacaccagggacagtgagtgcaaagccatgaccccagcaagcagtgcctggccagggcagtgggggtgggctgggggaccccagcaagcagtgcctggccagggcagtgggggtgggctgagggcccagcaagcagtgcctggccagggcagtgggggtgggctgggtggagggagtgtacttggacccagctcctgcaggcattaggggccaactgaggagctagaaccaccagatcctatatggagggggtcactggtctgcctgtgcccttgtcctggcctgttggagtgaatgagtctgggggcttgccaagagaagccccagtttggggccagggaggcagagagtgagcagcctccccaggtgttcttgtgtgcccccaggcccggacatatatccagtccctgccccccatgccccagaaggacctgagcagcatcttccgtggagccaaccccctgggtgaggactgccctgggctagactgggctccatatctggccctggatgtacagctgacccccctccccaccactggcttccctgcagccatagacctccttggaaggatgctggtgctggacagtgaccagagggtcagtgcagctgaggcactggcccacgcctacttcagccagtaccacgaccccgaggatgagccagaggccgagccatatgatgagagcgttgaggccaaggagcgcacgctggaggagtggaagggtgagcatggcagtggctgggggtgggtccaggggcctgcgggctccatttccccagaggcaggaaatgccccagttcctctccagactggtcaggtgtggaagggcgttcaggtgtccagcacaggctgggagcggggcggaggagtgacacagggcaggttctggctcccagactctgtgctgaggctgctgtcacagggtggtgggcctgggctgggtggcaggtgccagacaagcaggtgaggggccgggctgtgggaggcacaagctcaccctttcccttcacctcctagagctcacttaccaggaagtcctcagcttcaagcccccagagccaccgaagccacctggcagcctggagattgagcagtgaggtgctgcccagcagcccctgagagcctgtggaggggcttgggcctgcacccttccacagctggcctggtttcctcgagaggcacctcccacactcctatggtcacagacttctggcctaggacccctcgccttcaggagaatctacacgcatgtatgcatgcacaaacatgtgtgtacatgtgcttgccatgtgtaggagtctgggcacaagtgtccctgggcctaccttggtcctcctgtcctcttctggctactgcactctccactgggacctgactgtggggtcctagatgccaaaggggttcccctgcggagttcccctgtctgtcccaggccgacccaagggagtgtcagccttgggctctcttctgtcccagggctttctggaggacgcgctggggccgggaccccgggagactcaaagggagaggtctcagtggttagagctgctcagcctggaggtagggggctgtcttggtcactgctgagacccacaggtctaagaggagaggcagagccagtgtgccaccaggctgggcagggacaaccaccaggtgtcaaatgagaaaagctgcctggagtcttgtgttcacccgtgggtgtgtgtgggcacgtgtggatgagcgtgcactccccgtgttcatatgtcagggcacatgtgatgtggtgcgtgtgaatctgtgggcgcccaaggccagcagccatatctggcaagaagctggagccggggtgggtgtgctgttgccttccctctcctcggttcctgatgccttgaggggtgtttcagactggcggctccagtgggccaaagggcaaccacatgagcatgggcaggggctttctccttggatgtgggacccacagcagcttcctgaggctgggggtgggtgggtgggtggtttggccttgaggacgctagggcaggcagcacacctggatgtggacttggactcggacacttctgccctgcaccctggcccgctctctacctctgcccaccgttgtggccctgcagccggagatctgaggtgctctggtctgtgggtcagtcctctttccttgtcccaggatggagctgatccagtaacctcggagacgggaccctgcccagagctgagttgggggtgtggctctgccctggaaagggggtgacctcttgcctcgaggggcccagggaagcctgggtgtcaagtgcctgcaccaggggtgcacaataaagggggttctctctcacttggcttgtatccaaaggctactccaggcccgggtgcccccaccatccctgctgctgggcgtggggggagtgtctgggtcatcctgcatcactcacctccagctggccagatccctcaggcccccagtcagaccagcggccatcttctggcaccctccctgctccctggagggtctgagagcccagggggaccaggggaagacatggctgatgggcagactttgagggcacagggtgtgacagccacccagatggtgaccccagctgccctgtggggatgtactgggcaggcttggctttgggccaagatccagacaccacccccgcctacccctcagtgttcagggaagctggctggggagaagttgggtgtctcaaggagcaagggtctgcccatccctgggtgggggctgggcagggtagggaaaatagctttcctttccctcctggtgaaggaaaaagaggccactttaacccagggaatgtgcacgctggtcccgttcccactacgcgctgcagcttatgtgtgggggagggtccaggccatttggggtcaggcagtgtctctaaggaccagggacagtctgtgcccttgcttgggtcttgggtaggggtggaaaccgtctgggagttgggggcctcctggggcctggtcagtgtagtggtcaatcccgggggaagtccagtgttggcggttgggggtgggaggagaatggtgacacagccccacctcagaagcctggtccgtgcagggcctgctggacccctgagccccaccacggggagtaagggggacagcgtggaagctgggcttcctggaagaggtggatggagtgccacaggcagcccagggcacaaagggtatgggccacaggcagctgtggtttgggtggccctgggctgccccgctcactggtcacaagctggtgaatgccgtggagcacggcccaagcccaggtgtaaagctactaccacccttgagcggctgagctgctgattcatggcaggagggcggggcagaaggccctagggatcctgttacccaccagcccagtgggctcctggggtgccccaacatcccttctgagatccaggttcctgggctggtgaaggggtgtcagggtggggctttgccctcaggagcatctggtccaggatggggccagacctatgggaggacaatgcccacacagaggggtcaggcggagggccccagcaggtccccatccctgctggagagagtgcagccactctcagcctgggttttgcaggacaggacaggcaggggtgggatgggcagagacaccagtacttgcaatgcttggagcaggcaccccacagatggggggagcagggggaggagctgggggtccaaaagggcccacggggacctatgggactgagaggcccggggtcagtggccacaggagtggggttggggatgcagcctgaggagtttgggggacagacccctccgtgtagaaagagggatacaggcaggacaggtgcagatggaccccttgttgggggacggatggatcaggctcagtggtagggcatccttgggggtggcctgcgaagttgaccccgggaacacagggctcagcccgacttgcggctgccatagaagtcagcgctcaggctgtcaaggatgggccctgcgccctggagccgtggggagttaggactggagcgggcggggggggggggggggggctcctgctgagacccccccagggcggggaagttcagccaaaggggagaggctggcagaggtatctccgcgccgcgtccggccctttatggggacgaagctgcggggcggcgctcccctccccctgcgcttccccccaggctccggccctccccaggctccggccctcccccggcggcggccgcctcgggtttccggaggggccggagggcgggcgagggcgtcacgtgcgcgccgcccgcgggccggttggtccccgggcgggggaggggccgtgcgcagcctgggtcggggtcgggccggggtcggcacctgggacatccctgagggaagggccgggagcgggagcgccccagcggccggcgggcgggcgggcgagcggacgagcggcgcggagccggcccgaggcgcgcgccgagggagccccgtccccggtcgtgggggcaccgcccgcaggctctgcggggtgggcagctcccgggcctgccatgagctctccgccgcccgcccgcagtggcttttaccgccaggaggtgaccaagacggcctgggaggtgcgcgccgtgtaccgggacctgcagcccgtgggctcgggcgcctacggcgcggtgtggtgagcgcgggccgggcggggcggccggcggggcgggcggggcctgcgcggggtgcccggccttcccgctaagcggtccgccccgcagctcggccgtggacggccgcaccggcgctaaggtggccatcaagaagctgtatcggccyttccagtccgagctgttcgccaagcgcgcctaccgcgagctgcgcctgctcaagcacatgcgccacgagaacgtgagtcgcgcggccccgctccgggaaggcgccgcggcctcggcttggttcagctgggctgggttcccccacccggcaacccctcctccaggcagcctgctgtggggcsgggcgggggtcgggccgtgggtccccaggggagaaggagagcaaggcctgtctctccttgggagacgactcccccaagggccrttccccatcctccgccagccccgggaaggactcagccccttgactcggcgcctcagccaggccctggtcaggsaacacgacttggccaggcccaggggatcctccaggtctcacgccaagccttgcccccagccaggaagcccgcggtgagagcatgctcccggcgggaggattttcctggaaggggcaccttccctcttccccatcccctttccagcccctctgtggagcccactctgctgctgtccatctcccgagtcttccgacccggtggtggagggggaggaggggggcgccagaacgcagggagtgtgttgaaccctcaggagcccctgggggtgaagggtttagggagctgctgtttgaggagcactgggcgtggtggccgcctcacagacaccctcctgtgcgttgtgggggcccatcctttccagtccttccagtgagatgccacgtacagctgccctgggcctctcccatggcggtggctggctgctaagaacccgatctctctgccaggggtgctctggtttctggatacagtcccacttgtccactgccccccacgtcactcctgccctccccctggtctgggcccagcctgagggctggtggtctgggcacccggaccctacctacagggtgagatgctctggaccctcctgggtcatcygagccaccggtgccttgggagaacgagtccctgcgtccaccagcaaagtgccccgtccaccagcaaagtgccccgtcccccggttcctggccaccgctactccctcagccccttggatgggtctttttctctgaggcttcccatgcccaccctgacccccagctcactaccctgggccctgtgaaatccatttgcagtggacaccagccctgcccgcacctcgacaccccgtcacacccagccctgcccccacttcgccggcaccgcacccccccaccmcccgcccatcacaccaaggccttgccccaggactgcagccttccccacggccccctgctcccacccacccactcacccacccgtgccttgccccatccagccaagcgctctgggrctttttttctttttttttcttttgagaccgagtttcgctcttgttgcccaggctggagtgcaatggcacgatctcagctcactgcaaccttcgcgtcctgggttcaggcgattctcctgcttcagcctcctcagtagctgggattacaggcgcgcgccaccacgcctggctaattttttgtatttttagttgagatgaggtttcactatgttgggcagactggtctcgaacccctgacctcaagtgatctgctcgcctcggcttcccaaagtgctggggttacaggcgtgagccaccgcgccgggctccaccggggcttttctttagccaccgccccgctgtgctgggatctccgctgtgcctgtgggcccaccccctgggctcctggcctgcagctgaggctctttccctggaaccccatcttcctgggagactgaagctctgtgaggccacgtgccttgctcagcgggggaggaggctctgccacaggcctcagtcctgccaggccgcctccctctccaggccagcccccataccacagaggccaggccaagtcctgtggcccctagcccacaggaccctgctctccgtcttctgctaaagcactctcccgggcaccctccagctctcatgtccacagtccccgctgccccctggacaccccctctgttccctctcctcctccctccacattcttgccyatggctctggcccacgtggctccggcggagctgtccttccagcttgtgtccattcttacctcactctggccggttcctacaccacggccaggaggacgcatttagcctcacgtccccntttaaatcgtccccgtctcttgggatcaaagccaaacttccacctggtgtgtgctgccctgccggctccctctggcctctcctcagcccctccctggcctgggcctccgccacctggcctccctccctgtattcttcaaactatccaagtgtgctccctcctgcctcggccactctgtgtgtgccctctgccaggtgtcccgcagcccacatgtctacctgcccctccacccttggctgtgcaaaactccaggcctccctgggaccgtcaccccaaaatgctgaggcggcagttgtcacatgacctgtctactgtctatctccccaaccaggggtgctgaggggaccaggtctggtgggtcacggtgctgtccgcctgggcctcaccagcagaggcctrgcctctttccatagcgctgtccccaccctgggcctggatctgtttggttggggtgaagaggggtgaaagggtcaggcggcaggagccctttggatggttcggagccatcccagactccgggttgcccctcccccagaagatcccggttgtcaccgtccaaaaataacctttctgtgggtatgtgtgccagggctgggccacactgccagtgggtatgtgtgccagggctgggccacactgccagtgggcagagccaggccctttggacagtggggcatgacaatgacagctgcagagggggtttcctgcccagagggttgtgccactcttggggggtgccccagcccgtgtcctctgctgcattctcaaccctatgtggcccccccaggtgatcgggctgctggacgtattcactcctgatgagaccctggatgacttcacggacttgtgagtgccgacctgggctggccrctgggcacgaggggtgttgggcagctctgggcactggcttcaggttctaggttggcaatggggttctcttcctgcagcctgagtgggggatgcacaccgcccaccccctccccataccactgtccaccccacgccctcccccacatggtcctgggacccacgggcactggcacagctgggcagagctggggctgctgcctctctccacgcctggcacctgggccctctccagcaccggaggtgtgaaccttggacctgaccatttgttaacaggaaggtcccgtgctcgggaccctggcaccaagtgtgtggccggtaactggagctgctgaccttttccagcgggtgggggagaagcggtagggaggacccaccctgcccctgccctgcagccgaccaccctgggactcacaccctgtcggccaagagtgaagggccaggccgaggaaggcctggagagggtagcaggcgcctcccgcctgacttgcagaggtcaagtcagtggcctctgggaaggtgctaaataccattctcctgtgtctgtctccaccggcccagccgacccctctgacccagatgccttgccgcgcccccatcgcccccaggcacctccctcatttctggcacaaagttgtgaagttgaaacctgactgcctccctcccctgcctgtgaagactcgagtcctgctgcctctaccatgcagcctcagcccctagcctggcacgcagggcgcttcagaggagggttcaaaaaccccaaggcagcctcctccctgcctgacagtcctcagggtgggaggggggtgtgagcgctgctggcagtaacagttgcgggaggatggagcctggcactgcaaggtggggctgcgaggacaccgaggccagtgtggatgtgtgctgcaggggtgaccttcctgggggtgcctgttggatccgggacgggtctgagcctgggcctgctgggtgggtctctgggatgcagaggctggctctgtccgctgacagcgctccggcccctcccacagttacctggtgatgccgttcatgggcaccgacctgggcaagctcatgaaacatgagaagctaggcgaggaccggatccagttcctcgtgtaccagatgctgaaggggctgagggtacgggcccygggggaggctgcagggaggcaggcagggcctcggggctgggcagaggagggccctgtggctctgagagggtgcgctgaagcctgccaaatcctctgccccccgcagtatatccacgctgccggcatcatycacagagtgagtcccggtggagaagccgctcatcagccctcccccagtgcaatccccccgcctccacgtcccacctgtgaggatgtgatggggtctgggkgctgagccacgccctatgcacagcccctggtgggaacctgcctgggtgcccaggtaccttggtctgcccttgaagggctgcagagagcaagggggccaggtccggtggccccatctttaggtgccacccaggctcttggctgtgcccatgcttgggagggtggggcacagtggccacctttcctctgcccccaggacctgaagcccggcaacctggctgtgaacgaagactgtgagctgaaggtgtgtgctgcctggcagggggccctgaggtggggcaggggccccctctggatctgcccatctatccacctgtcaggcctgggcagggggccaaggtcccaggctctgggcagtggctgaggagctggtgggtgggtgagcccaagaggcagtggtacacaacatgccgtacccagggcacctgctccgtcccgagggctgctgggcttggtgcactggccagagggaggagctcggggcagtttggggtccgagggcgtggcctcaagtccttgaaggttgtcaggaggccccagcttgggagcttcaagtccaaccccccggggtctcctggaccgtgggtggcctgtccgctccttgggagtcccctagaacccacctccccaattcttcccacagatcctggacttcggcctggccaggcaggcagacagtgagatgactgggtacgtggtgacccggtggtaccgggctcccgaggtcatcttgaattggatgygctacacgcagacgggtgagaagctgcccagagatctgggcctctcaggctgcaccatctgcttctccacttcttcacggacagccctgtggtggctgctcccagggaggctgttgagctggggtgggagccgggcaggtgggctgtgttggtgtctcctccctccccgtctcatcctgtccccctgcccacggagctgaccagggcttctatctcagtggacatctggtcygtgggctgcatcatggcggagatgatcacaggcaagacgctgttcaagggcagcgaccgtatcctccagccgcagggcggcaccaggggcgggtggggatggctcctgcccaggtgggggcagtgggggccctgatctctggcccccgagctgtgttcctgacctcggtgcagacctggaccagctgaaggagatcatgaaggtgacggggaygcctccggctgagtttgtrcagcggctgcagagcgatgaggtaaggggtgagtggggagctgggtgggggtgggggcggacctgggccttggtgttggcccctcaccctttcttcccacacaggccaagaactacatgaagggcctccccgaattggagaagaaggattttgcctctatcctgaccaatgcaagycctctgggtacggctggctagtgtgggggccaccgggtgctggagtgtggggcctcccgtggtctggcctgatgcaccttcccccgcagctgtgaacctcctggagaagatgctggtgctggacgcggagcagcgggtgacggcaggcgaggcgctggcccatccctacttcgagtccctgcaygacacggaagatgagccccaggtccagaagtatgatgactcctttgacgacgttgaccgcacactggatgaatggaagcgtgagtggggggctcctggcacggcctgtgtggacccaagtggggggctctgggcagggcctgtgtggaccygtgagttgggggctcygggyagggcctgtgtgracccgtgagttgggggctccgggtagggcctgtgtggacccygtgggccctgtgcaggtggccaggctcagagtcctagatccccatccctgggatgcaggtcaggtgaggaggatgggaggtcagggcagcatggggccgtgtggcctggtggagatgacctctggctggagctggaagatgaagggaagggtgttcctggcaggctcagcacagaggctggcacagaaggagccgggagtggtgaaaggcagctgtgagtcagggaaccagggcccacttagcccctcctggcccccagacctgctgcccttccgccatgtccaggccagagacctgggccaccctgacaccctcaccacgtccgcttgtccctaaggcctctctgctcacacctcctgaatctgtccttgcctctccttgccccatttttgttttttgagacggagtctcactctgatgcccaggctggagggcagtggcacgatcttgactcactgcaagctccgtctcccgggtacacaccgttctcctgcctcagcctcccgagtagctgggactacaggcgcccgccaccaggcctggctaattttttgtatttttagtagagacagggtttcaccgtgttagccaggatggtctygatctcctgacctcgtgatccacctgcctyggcctcccaaagtgctgggattacaggcgtgagccaccgcgcccagccctctccttgccccactttaggatccctcccccctggacaactgtatacccaagacagtccccagggcctcgcctgtctcccccagcccccgctaagcagtccagactccaaccccaactgctggggtccatcatcccctataccaggggctatcccctcaacttggagggctggccaaagcctgtgcagcctcaggctggactcagagaagcctccccagctcccgcagctatgctgtggcctgaggctgtgctggacctggcttcatttctgctccaggatggcaggctgtgtcttcttcatggctgcatgaccagcctggggtgggtgtgcccggggaaagtaggtgtacactgggagccgtgccatgtttcaggccctgtcctggctctgcctcgggtgcgggaccttggtcctccacactggctgggtggggctggatgggttgagattcacatgtgctccttacgaccacgggtccctgggtgcccgcagcagggcctccacccttcgctgtgtgcatattcgtgtgcttatgagtttggctttgtttgattaaaggtttctgctgctagaaagataacttgaaagccatgggccataggatcctctctgtagtccccacccacacaactgtggctgaggcctcagctcttaggacagaccgtggtggacatgtggccargccctggccacctcccctttccctggaaaatccagatctagagcaatggcctcttcacacaaaccttctctcagtggttcagaccanattaggattagagaagggccccacgaggcaccgccaggcgtgtctgtgagcgactcccaggatggaaggcaaaggctgacccccctctctgttgtgcccgcccccccacccccgccaggtgttacttacaaagaggtgctcagcttcaagcctccccggcagctgggggccagggtctccaaggagacgcctctgtgaagatctctgggctccggggtggcagtgaggaccaccttcaccttccacctgagaggggactctcgttgccaccttgaccttggctggggcttgcatcccaaggcatccatcagagcagacrcccgggttccatggaccctcctccccacggccatgcctctgctcttgggcgcccatcatggaggagcacctgaactttctggacaagacctctggccgacctggggatggcctctgatccctggagcagtggcccacttgcccggtgctctcagaaacctcagagctggtggggctccagatcaggccttggcctctgagccctgcctgctctgggccatgcagaggaaggacagagggtgggcgcagggcaccaactcagggacatcccctctcctgggcgacgtcagtggaccttcctgcacccccagcctggaatgtaaatcagctgtgtggtgcccgcgtggctggaaggaaatagacccttttgtagctccctgttctggctgtgcgtcctcatgccgggtcccaccttaagacctccgggcccttggcctgcatgtagaggaggctggcctgatagctcagacccttagagccaggaggggggcctgagcatcccatctctcccaggccacaaagctggtgcccacttcccccaggcctgtgccagtgatcttcgaacccccacgttagggcttggcccctccccttttacggggtgacctgctaatggcttagactctaagccactgtgtgtggatcctgaagccagacccaggggcagggcctgatggggaggagtgttaggatctaccctagctctctgcatcctccaatgccagcaggtccctggggggagggggcacgctgggcacgttgagacccctgtggtgaagtggtgagcgccagccagtccctggggggacggggcacattggacatgttgagacccctctggcccctgtggtggattggtgagcgcagagggctgggttttattcttgatcaaacctctagcccctactaccctgctccagtggtatcttcgtgcccaggccgccctctgcaggccactcggtgtttccaagggtggcggctggaacacaggccatgggcacctccaaacctgtcccagggcaggggttacagcagagagaccagtgaggggcagggcagggcaggccaggtgtcctcggtggacatgcccacagctggcccagccaaagtggacctgatgagctgccacgacagatgggccttctctgcccagcgaccctcatgcctctccagggcatccgggcctgggggacgtgatcgccatcagttccggagccacgctgacttgtggcatggctgctgtccacactgggcccaaagtgtgggcccataggtggcctgaggactgggggccccaaaattctgtgacccagctggatgtgaactcccgcgggggcagggtgtcccctgggctccagggggcctcaggtttcctctcgggcatcttgctccgtggctgtgcccgtgcctcctatcttcctcagtcccccaccatgctaccgcaaccccggtccagtgtccccacctccaccgaccttgactctgctcttgggccaggggtcttcttggagctagaaccggactcactccctccttaaacctcgggggcggtgctgcgcctccatgcagccacgaccaccgccctgagccggccgcagcgccacctgcctccccgcgggctcctcccgcctcgtggcctttgccctgcagacccctcgcccccctcgcctttcaccccaggtcttcctgcgcccgggccgggtgggccttggggctgcgctggaccctgacccagctggtgcagaacggggctctcatgggcaggctcggccacgggcgttcgggtggggctgcggcgaccactcgcctaaggccgggggaccccgcccctcttggaggggatcggggcggggccaatggggaggcggagccgcagcgcagctccgagggctggcggctcggggcgccgaggcttccgcgcccgctggttcctcgctccggggcggagctcgcgatagcgaccgggagcagggcgcggggcgggacccaggtccgaggcgaggaagccggaagccaggcgcggggagcctcccccttcgactgcagcctcgctccgtgccttctgcgcgcctgggatcccggagcctgcctaggttctgtgcgctcccgcccaggccggtgcccgccgcccgcctgcgccccaggcaggtcccaggcctccggctgctcccggccgaaggtggggacaggcagtggcaggcaccactagcgagggcgtttgggaacccagggtgaccacggcgcagccatggggaccgcgcttgtgtaccatgaggacatgacggccacccggctgctctgggacgagtaagtgggacctggccgaggtggggtgcggggagggacctctgaactgagctcctcatctgccccagccccgagtgcgagatcgagcgtcctgagcgcctgaccgcagccctggatcgcctgcggcagcgcggcctggaacagaggtgtctgcggttgtcagcccgcgaggcctcggaagaggagctgggcctggtgcacaggtcaggacgggggcaggccccacgatggggggcggggcgggcagcccagctagaaacctaagaacctgggcctaccccgagcctgccagcctcgaatacagagcctctccctatgcacctcgggtgggctcacaggcttgaggaagtgacagggtggccactcccaccacgaatcccaggtccccgcctcccgcccccctgctcctgctggtgaccctgcctctcctgcctgcccatctgcatgcagcccagagtatgtatccctggtcagggagacccaggtcctaggcaaggaggagctgcaggcgctgtccggacagttcgacgccatctacttccacccggtgcgtgtccccggacacactcacctgtgcagacacacatgcacgtgcctttgagcgttcacagccacggccgccaaccccagccagtgtcccctggtccatacacatgacattgccctgcacacctgcctgctggcactgccagagcctggggctggcctgttctgctcagcagctggtgtcttgcagcctggcacaagtgtgggtatggcctgcaaagggcagcagggaaggcagggggctcatctgcgcccctgcgcccacagagtacctttcactgcgcgcggctggccgcaggggctggactgcagctggtggacgctgtgctcactggagctgtgcaaaatgggcttgccctggtgaggtgagagctgccccttcccctggctgctcctccgtgggtggccctgtgaggggccagggcgaccctgacgtgacccaaatcctactctcacgccgtaggcctcccgggcaccatggccagagggcggctgccaacgggttctgcgtgttcaacaacgtggccatagcagctgcacatgccaagcagaaacacgggctacacaggtgtgtgccaggctggctgcaggggggtgggcccaggccacacagcaaggggcggcgcaggaggcgagagaacccagccagcaccttcccatccctggccgggctcctggaggtgggaggccctgcccctttgccaccagcgctgtctgtacccaggatcctcgtcgtggactgggatgtgcaccatggccaggggatccagtatctctttgaggatgaccccaggtgagcaggggtgcggaaaccacccttccctgcagccccagtttttgggtgcacagcctggcctgggaaaatccaggggtgagatacagacatgtgctcaggggtcagcgttctacagggagctgtagagctgttgagggtcctgacctttgacctctggccctggctggctgttggcagcgtcctttacttctcctggcaccgctatgagcatgggcgcttctggcctttcctgcgagagtcagatgcagacgcagtggggcggggacagggcctcggcttcactgtcaacctgccctggaaccaggtgcccaccctcaagccccaggtccccacccagccccctccccctgggcccctcccctcccccacagttcaccctcaagccccaggtccccacccaccccctcccccgggcccctcccctgccccacagttcaggatgtagcctgggatgtcctgccaggttgggatgggaaacgctgactacgtggctgccttcctgcacctgctgctcccactggcctttgaggtgactgcacggagggctcccccagggcagccgggtgggagggggaccttgtgcctggagtgcgccagtgaaggcaggaggagggttatgagctgtcccactcctgtgtggctggggaaggtgctcaggaggggatgggatgggcctggctcgccctcacctgggctccagcccctctctgtcgaccctccccactccggcctggcctgtagtttgaccctgagctggtgctggtctcggcaggatttgactcagccatcggggaccctgaggtgagggccttgccttgccagggagggcttctggggtcctggggcccaggtcccccatcacacatggctctggttccaggggcaaatgcaggccacgccagagtgcttcgcccacctcacacagctgctgcaggtgctggccggcggccgggtctgtgccgtgctggaggtgactggggagggcacacagggagggtctctgggccagaggcctgggggtcaggagcatgggagccaggtgcccacggggtatttgggaggggcgtcctgcccgggatagagccaggcaggggctctcccggtgacatcccatcccagtgatatctctgccccaatcatgtctccaccctcctcccagggcggctaccacctggagtcactggcggagtcagtgtgcatgacagtacagacgctgctgggtgacccggccccacccctgtcagggccaatggcgccatgtcagaggtgcgaggggaggtagggcgggcagggccggggtgtgagaccaggtgtcacgactgttgtgtctccctcacagtgccctagagtccatccagagtgcccgtgctgcccaggccccgcactggaagagcctccagcagcaaggtcagtgtggccgggtgctaggctgcaggatcccacctcgggctcctgtgcagtggctatgactccgaactgtccctagatgtgaccgctgtgccgatgagccccagcagccactccccagaggggaggcctccacctctgctgcctgggggtccagtgtgtaaggcagctgcatctgcaccgagctccctcctggaccagccgtgcctctgccccgcaccctctgtccgcaccgctgttgccctgacaacgccggatatcacattggttctgccccctgacgtcatccaacaggaagcgtcagccctgagggaggagacagaagcctgggccaggtgggcagggctggcctggggagaaggatggggccgcatctacacctgtgcctgtgtgtgcctgacctgcggtcactccgtgtctgtgtgtccctctggtctgtccaccacaggccacacgagtccctggcccgggaggaggccctcactgcacttgggaagctcctgtacctcttagatgggatgctggatgggcaggtgggagcacctgggaggggttggggatgctgtggacctaggggcagggaccaggacctgccaacgagatgtggcctgtccagaggagggctgggtggtgcagaaccacatggatgtgaacattgccttgtgccaggaactgttcccagaacagccccaggggtggggatcactagtgtgtctgacctctgacctcagcttcttcagttaaatgctctttggcagagaggtgaagggggtgatttaaagtatacatttaggcagggtgcagtggctcatgcctgtaataacggcagtttggggggccaaggtgggagaaacgcttgagcccaggagttcaagaccagcctagagaacatatggagaccctgtcttcacaaaaaataaaaaagtcagccaagcgtggtggtgtgtgcctgtagttacttaggaggctgaggcaggacgatcgcttaagcccaggagtttgaggctgtggtgagctacaattgcgccactgcacgccagcctggctacagaacgagaccctgcctctctaaaaaaaaaaaaaaaaaattatagacgtaagcatcttatttacagaaatggagtgattgaccttagtgtaagaagacgtgtggctgacagtagccgcagagacacaccgaatgaagggaactgtggatctgtttacctggcttgggagttggttggtgcctcattctccactgtttattcatcccacaggtgaacagtggtatagcagccactccagcctctgctgcagcagccaccctggatgtggctgttc

SEQ ID NO: 97423 - DNA, 18753 bp, Homo sapiens
ataagggtggtcaggccaggcctcattgaggaggtgatatatgagcagcgatcttaatggagggagggagccgtttggggaaggacattcctggaacagcaaatgcgagggtcctgggcgaggtgtgctcttggccagctcaaggaagagctggtgtggctggagcacagtgagtgagagaaaggggtaggagatgtaggagatggtttgcaggtggctaggcgatgaagtaggaccttgtaggccatgagggggaaggtcagttgcagttcgaaatgtgtgagaaagccttgggtaacgtggagcagggagtggtgtgatttctcaattaaagaaagcccacaggacccaccagcagttcctgggctttccgactgagaaccccggtggccaaacagcagcaaggtcctgcccacaagggaggggaggctgggcgagtgtgtataccaaacaggttagggaagctgattaaaatctcctcagggcctaactgggaagggccagaggaagctggggatgggagtggagggtaggagcaaaaggacaaaggacatctgtaggttgtggagaaaaagggatggggtcggggccactgtggtcctaagagctcaaaagacttcaatgctcgatgcttcctccagcatgttctgagatcctcacctctccccttccgccaaaagcaggtggggggagggtcccgtccagactggacatagccgactctccttttctctggctgggaggcctgccacaaatgctcttggctgccccaccccctccccgcagcttccctgttccctccccagttcctcttgtctgtagggtgggcaaggcggctgactcctactcctgagttaccacaagtcagctgcctgcagatctccccaccccatgactgccttccatgtcttctcaccctgccctgagagtgctggagggaagaggtgagtctcccaccccacccccaccaacacacagttgtgctccaccatactgaacctgactctcagtgagactttgctggccctgagaatgcacggggaaggtggctgtcccctgccttggcccccatcacttgccaaacctcctcagatgtctcccctatttccctaatagctgagcattgaggatttcacagcatatggcggtgtgtttggaaacaagcaggacagcgccttttctaacctagaggtgagagtcctctcccagccaggggccatgggggacattctgtgctccttctcccagcataagaactgtactctgacctcatatcagggttacttgggtctgagtctcttctgggtcaaccatcccccccaaaaacaacaacaacaacaaaagccacctcatactcttagggagcagagacgctggctttggggtagaaaggcctggggcctgaatgtcaggggctggggtgtgggccattttcttggtgagcctttatgggtatggcttgccagaggagagctgccagagaggtgtggggggctgggccaggcccactggcccctggctaactcaccttttgcctctcccctgtccccagaatgccctggacctggccccctcctcactggtgcttcctgccgtcgactggtatgcagtcagcactctgaccacttacctgcaggagaagctcggggccagccccttgcatgtggacctggccaccctgcgggagctgaagctcaatgccagcctccctgctctgctgctcattcgcctgccctacacagccaggtactgcccgcatggcccagccaccagcctcggggcccagagagcagcaaggccctgggctatggcatgtggtggcaccgtttggctaaagatgccagtactccccaccccctcacagcccttccagaaggtgccctgtgtggccagaagaggaggggagggcctcttctgtgactcaggagttggtgcctagcactgagctgggcctccagagatgaggcagatgtgagccctgcgggtggggagccttctcacctagccaggcccttgtcacagagcaggtggccaggacttgagtgtgactgagaagcctcggggtgggatgggcttccaggagggggcactgaggtaagagtgtgcaggcttggtgcgtggggctagtggggaggagaagctggggtcggggaagggtagtgggcagtgcaggtccaggccgcctgaggactctggcgctctgtttgtcttccatagctctggtctgatggcacccagggaagtcctcacaggcaacggtgagtagaatcagggaggatgcacgtcctcatctagcccttgggtgggggccacagagagagctggcctgcagttcctcggcctcctcactcccagggtggcccgcctgcttctcggggcagctggcagtggagcagggaaatgctggctcccaggaccagccagggaccacctgacagaagaccctgtccagccagaccccacttggcagaggggggcggctctctgtgctggaggctgtggagccagtttctgtgcaggcagcgtgaatcctagagttatgggtttaataagactgcagacatttggaaaaacaattctggggactcatctatttgcaataaaggacagtcactccccatggaaaggcagtcgtgaacctttcatgggtggatgtggagttttctgtattgatatgtattttcttatgtcacataggtagggcttggcattagggaatcgatgactgaagccacagttgtctctgggggaggctgggaatgggggtgggatgagaagtagctgctcctaaggatcctcagtggaaagtaaacacaccactttcagatggtctagaaggtttctaaagcagacagtggggagtgtttctttatgcagggtgcctggtgacctgagtctctgctctccttgttgaccctcagatgaggtcatcgggcaggtcctgagcacactcaagtccgaagatgtcccatacacagcggccctcacagcggtccgcccttccagggtatgtgcccttccagcaggggctctggggcgtgcagggagaggcagtgtggtgagtctgcttggaggtggggagtgtatgccacaggtaggctgcccaggaggcccagcataggggaagcatgaggcacagaacccctgtggtgtgactatttggagtggctgactctgggggcagggctaggatgagcactcaagtcctgcctccccattccaggggcagctttccatctcgtcctgtgaggcttgtgggtggcagacttggacactaagtctaaatgaccctaagtttgagggactaggaatgtcatcagggtttagggggcatcagggaaggcttcctggaggaaaggtctcctctggctgatgggactttgagatagtggacagggtgtcctgttgggaggggaaggagggcacgacaattgggttcaagtgtgacactctcccagggctgctgaaagaaggctggttgggtgtttctgcaggtggcccgtgatgtagccgtggtggccggagggctaggtcgccagctgctacaaaaacagccagtatcacctgtgatccatcctcctgtgagttacaatgacaccgctccccggatcctgttctgggcccaaaacttctctgtggcgtacaaggaccagtgggaggacctgactcccctcacctttggggtgcaggaactcaacctgactggctccttctggaatgactcctttgccaggcaagggcactaggctggggaggactgtgccaccacaggtgaccttcccatcactgtgggtcgcaggtggggcagggagccagggtcaggtctgtgttttggggtggggatggccatggtctggttggggtctgggcagcgtgaggatgtaggaggtgtcatggcatggggtgctgttggagggggagttgctcagacttctgcctccccatgcttgcgagtctttggttgggaccttggttgttaacacctcaaggttacctgggaacctgtcacctcccccttgagcaaaacctctgggactttgtgtgggcaaataccaggccagctatctgagccatttatggggcaaccatgcccttctgtttgctctcgcccccaaagcccagcccaggcaccttagtgaccctaagagggagtaaaaggaggggcagtgagctcaggggaaccagaggaaggacccccatgctggtggcaagggggacctgggtcctggcttccagctctgttccgaccttgcaatgtgactggatcctcagttttcctatctgtcaagtggggacactgcttcttcaggtggctgcaaggacccaaggcagcttaggtaggagcagagctgaggaacttgttcctctaagatgccaaaggccctcccagagcctcacagtgcgcctctttctctggccccacaggctctcactgacctatgaacgactctttggtaccacagtgacattcaagtgagtcctgggggtggttgaggtatgggtgggctggtgtggccccagcctccccagctcacctgacatccctgccaccttccccaggttcattctggccaaccgcctctacccagtgtctgcccggcactggtttaccatggagcgcctcgaagtccacagcaatggctccgtcgcctacttcaatgcttcccaggtcacagggcccagcatctactccttccactgcgagtatgtcagcagcctgagcaagaagggtagtctcctcgtggcccgcacgcagccctctccctggcagatgatgcttcaggacttccaggtatggagcgggcgtggcccagcttcaggtgggggagcccaggctagtggttgagagacgaagagaggcttgggcttgggcatgtagttgagagtcctgtccctgcgctgcccctgtcccagttcttgctgggcctcccaacggtcctttctgacccgtgtctgtgtgtctgccagatccaggctttcaacgtaatgggggagcagttctcctacgccagcgactgtgccagcttcttctcccccggcatctggatggggctgctcacctccctgttcatgctcttcatcttcacctatggcctgcacatgatcctcagcctcaagaccatggatcgctttgatgaccacaagggccccactatttctttgacccagattgtgtgaccctgtgccagtgggggggttgagggtgggacggtgtccgtgttgttgctttcccaccctgcagcgcactggactgaagagcttccctcttcctactgcagcatgaactgcaagctcccctcagcccatcttgctccctcttcagcccgctgaggagctttcttgggctgcccccatctctcccaacaaggtgtacatattctgcgtagatgctagaccaaccagcttcccagggttcgtcgctgtgaggcgtaagggacatgaattctagggtctcctttctccttatttattcttgtggctacatcatccctggctgtggatagtgcttttgtgtagcaaatgctccctccttaaggttatagggctccctgagtttgggagtgtggaagtactacttaactgtctgtcctgcttggctgtcgttatcgttttctggtgatgttgtgctaacaataagaagtacacgggtttatttctgtggcctgagaaggaagggacctccacgacaggtgggctgggtgcgatcgccggctgtttggcatgttcccaccgggagtgccgggcaggagcatggggtgcttggttgtttccttcctaataaaataaacgcgggtcgccatgcgttgggcctcttgtcgctcatttctgcgctgggctttaggcgcgtgctcgccggagggatgcgggaggatggagcctggcgagggggaggcgaagaggcatccgcggagaccgggaggggctttagcaagctgggccctaaccgctcagggtagggaggggcggtcgggccgagtcccggtgcgcttcggcgtctcaggaggccgtcgtgacaatggcagccttcgcgtcgtgagggggccgccccaggctgccgcagcggcgcgcgcccggccgcggggccgcgccgagactcccgggggggtgggcgggggtggggaggtgggcgggcgcgcgcggggcggggcggggcggggcgcggcgggtggggcggggcgcgcgcggctcccgcgacggattcttcctgggccgcagcaccggccgccggcccgccccgcccgccccgccccgcgcctctctagactctcggcgagcagcgtcgcccgcggagccgcgctggtgctgtggcccgggccctggcagccctcccgggaggcgagccggggaggcggtggcccctgccggttgcggcggggcgcgggaagaggcgggactctttgacgcggcggaggggtcgggcgacggccgacgcgccgccatctttggtccagtgcggtggcggcggyggcggtggcggcggcgactgctgcggtgaaggaggaggaggagccgagcgggcgctggcaccgaggcctgaccatggacgaggaatacgatgtgatcgtgctggggaccggtctcaccgtaagtgcggccccggcgcccctggccctgcgtcgtgccctcgycatcccccgcgatgatgcggccgccggcccatcctctggtcactgccatcttctgcgctccgctccccgaaaagccggcgccgtgcccaccccgctgctcccccmgcgacgtcgcctctgctcgttgccatgaccccatctccccgaagaggcccccttcctggccgcctcctgggctacccgggtccgacccccggcgccctcccatcttccctacccctgcccgctggaccggaaaacgcacccccactcggcccgatgcccacgaccccgcccacccatcgcccccacccatcacggcatccacccgtcgcccgcacccattgcccgcctagcgttgcctctcagcgtcccttcccatcttgcgctaatcccggtggggatgaagtagaaggacctggggtcagggggcctcgccagagtgggccctcagcccgcctcctcatcgtcttctggggccaggggatccagggaatgttccagaaggaacagcagtgggggcagtaagcacattcccgcaaccccacctcggttgcccatggagacctcaggctgggtagcatctgcagcctttgtccttgggctagtgacagtgactggtgagggtgtttatcttccccctttccccgaaaaccccgttggcctactcccctcagagactcttcttcctcggtccaggcccagatgcccctcctcagcggcaggggctcctgctatttgaagaaagagcagtccagggtggggcctacaatttcaaggactgtgctaagcctttcttttcctccctttcgagtgtcctttgcagtccagctgggtcttctctgtgccttattgtgttttatccgcctttttgtgcggctctgcgtaggtagatgcctctcggcgtgttggtactggaaggccatcctgtgtctgctggatgccctgcctccctcaaagcctccgttatttcactctccgccttgtgagggggacgggactcctttgcccagcaaggttgcaatggagagtgtggtcggatgaagccatcaccccaattttaggcgaggcaactagccagtggggatggtgggtggaaggagctgtccactgaggcaggtttgggtggggaacaaatcaggtctgctggtaggagcggaggcaggtgggagtgcagcggatggtgtcaccctcccccaggaatgcatcctgtcgggcatcatgtctgtgaacgggaagaaggtgctgcacatggaccggaacccctactacgggggcgagagctcctccatcacacccctggaggaggtgaggctgcccaggcccaagcctatccctgttaacctcccacatagcggcacagggtggaagtagctccccaggtgcctggagcaggaggaggtggtccctgaggtgtctctctctctcccttctgcttacagctgtataagcgttttcagttgctggaggggccccctgagtcgatgggccgaggcygagactggaaygttgacctgattcccaaattcctcatggctaacggtgagggacaggaaggaggtattgcaggtcgggggtgatagggaagacccgaggacggtcaggctccagaggaggcacggccagaccagctagagcctctggagagagccgtgctgatgttgcccttgtgcacccccacagggcagctggtaaagatgctacygtatacagaggtgactcgctacctggacttcaaggtggtggagggcagctttgtctacaaggggggcaagatctacaaagtgccgtccactgagactgaggccttggcttccagtgagtgtgggccccctgagccagagaaatcatggggtggcagggaagccaactgtctttgggatgggtggctgtccagaataaggcacccccttgtccaaagtcacatttcccgtgaaggaccagagaggcccttcactctgtattccctctgccccatgtcatgctgcacggctggctgccaggagggaggtcctcacacagcagggatgtgatgtggaggggaacggggctccttttgaaagacttgagcctggccaggtgcggtggctcacgcctgtaatcccagcactttgggaggcctaggcgggtggatcacgaggtcaggagttcaagaccagcctggccaacatggtgaaacaccgtctcatctcaaaatacgaaaaattagctgggtgtggtggcatgcacctgtaatcccagctactcgggaggctgaggcaagagaatggtttgcgcccgggaggcggaggttgtggtgagccgagatcacaccactgcactccagcctgggcgatagagggagactccatctcaaaaaaaaaaacaaaaacttgagcctttggcagggcctccactgaatccccgagacatcgccaagtgtctgagccaggaaggcccttagagcccatccaggccaatcccctcttcatccaggtggggaaactgaggctaaaaagggtggagaggttaacctaagatcacaggacagctgggctgtgagtgggggtgcctgccctgctgggatggagagttttgtgctgcattgatgcagaacctcctcccgccgcgttccttagatctgatgggcatgtttgagaaacggcgcttccgcaagttcctggtgtttgtggcaaacttcgatgagaatgaccccaagacctttgagggcgttgacccccagactaccagcatgcgtgacgtctaccggaagtttgatctgggccaggatgtcatcgatttcactggccatgccctggcgctctaccgcactgatgagtgaggggaagctgggtggtggcagccccctcgcccggcccgcccccacccttcccacacctgcctgctgtccccctgccccgcatgtctcttgtactcagccacaggctcacctatcaccctttccatttcccccttgcatttgatcctcatcttccccaggccattcagggtggtgggaagactggcctggtacctgggtgggggtaaatcaggggtgctgctattcccccagytacctggaccagccctgccttgagaccgtcaaccgcatcaagttgtacagtgagtccctggcccggtatggcaagagcccatatttatacccgctctacggcttgggcgagctgccccagggttttgcaaggtgaggacatgggttttttcagttggcatagctgagtaggactagggccaggagtggagatggccrccttgagcattttcttggtagtatttcctcctttccaattcgtgctcttcatttacttcmctccatccttgggtgatgagggcacaaccccagtgcactgaagtacagaagtctccacacttgaaaaaacgagtctccacaaatgtgacttgctcagttcccggcagcaccaggactgggcccagggtcccagaaccttgagtcagggcttagctgggagctgacctatctccagagagtccattctggtccctcaggctgtcttggtgcggagcactgatccctcatgccccctcccgctggcccttggcagtgtattctgagcagaagctccagagaggaaagagcccgcggagatggggccagcgttcacggcagtgacagagctgggatgaatcccggcgtctcctacctgctgcctgcctggggcagccttctttgcactttggtggaggaagggtgcagtggaattggtccccgtttctcctgggaggggccttcaccggagctgctctcaccacagattgagtgccatctatggggggacatatatgctgaacaaacctgtggatgacatcatcatggagaacggcaaggtggtgggcgtgaagtctgagggagaggtgagcccttcccgtgcatgcagtgcagtcccatggttgaggcggggcttggtcactttctctgtgctgtcgagtctcctgctgcacagccccaagggtcttggagctgggaactgggggtccagaagtcttcagagtcatgactgtgggtgagaggtctctttcagaggccacatgccatgtctgtggtgcagaaagtgttcttgatcacagtgcctctggggkgcgggggggcgggcacccagcccgtgcgtcaaggcccacctatctgagcggcagggtagggccatgcattcaggaggggcagtagtgatggctccgaggaacgtcttgtctgccagagctgcctgcccttgctgtgagcgcagccccacgtctacctaagggagggatgtgacaggggcgaggacttctggtgccttctcaggtggcccgctgcaagcagctgatctgtgaccccagctacatcccggaccgtgtgcggaaggctggccaggttatccgcatcatctgtatccttagccaccccatcaagaacaccaacgacgccaactcctgccaaataatcatcccccagaaccaggtcaacaggaagtcaggtaggccgggcgctggtacagcttcctctagggtgttctctttggggttactctttttctccccatcagtgtgggagctccctgccttacctctctggaaaaaaatttgagccacattgtagccaccacaacttggagccctagggtttgggtggcctggactctttccctctgggagggtggcggcttggatgctacctgctctgcggggctggggaggggcagtcgggccagacttgtgtccagccactggaacccctctctgcgtatggccagcgcctctggcctgagttgacggagctcttcytgtggccagacatctacgtgtgcatgatctcctatgcacacaacgtggcggcccagggcaagtacatagctattgccagcactactgtggagaccacggaccctgaaaaggaggtggagccggctctggagctgttggagcccattgaccagaagtgagggactgggctgagcccaagggggagagggagggagcccagcagctgggcttagggaccaggaagggcatggcccattgtgaggcctgtcccctcccctctgtctgcccctcaggtttgtggctatcagtgacttgtatgagcccattgatgatggttgtgagagccaggtaagcagctcgtcccagccctgggctcctggctgcccgcccaggatacctgtctgactcaccctgggcgctgggctctggctgtttccaggtgttctgttcctgctcctacgatgccaccacacactttgagacaacctgcaacgacatcaaagacatctacaaacscatggctggcacggcctttgactttgagaacatgaagcgcaaacagaacgacgtctttggagaagctgagcagtgattgtggccgcccccagcccctgctgccccagcctgtgtctgttctccycgagggctccagcatcctctgcttcccccaccacgttcccatcacccacctcattgatccactgaccaaatccttaaccctagcgatggcttgggagatggggggttggatagcatcctctttcttggcccttccttatcctaggaaaagagggttcctctccttgtgtgtgtctcttccccccacccctaattcttctgctctgtttgggaagacgtggaggaaaaggtgacttctgcccccaccgctcttacccccactgtagtggcctttggagatgcccccacctcccccccaccaactctcgcgtgttggagagaaggggccctcccagcacaaagttgcattcctcccccctaatttattytaatttattaactttgacccaccctttctgagcctgcagccttcccgtgtggcctgagggctgtcgagtgagctgccccagcccctcccagcccttgcccagcctgggggagtggggaaggcttgggcatggccccgttggaggttgatttgctgttttgtttcttgtctttgtgttctgtggtacttgctgagagaaaagaaaagtgagccaagcagaaggaggtgggaaaacggacccaaaccccagtgtgccctgccccatgcctttcctttagtggtgggaaacccttatcttgcaaagtgaatgtgtccccttccccaccctctaktgtatttcacagaaaacaaaacctcccaataaaacggttgaaacctgaatctctggatcttgatggttatctcccaaaagctgggtacctggcagggctttggctgcctgggttggggctctggcttagcttcactctggactgtaaaaggtggcattcttcaccagggaattcctcacccagagcacgctggggccaaattgacttaaagcttaaggctacccagtgagtcgatgctggcaccaggactgcagccctcagtgctcaatgcagggggagtgtggtggagggcgggtgtcaacgtggaggaagcagagggagcgggggtcctggcctctggcttgaaaggagagggcagaggggaccaggggccagcctcggatgggattctaagtgaagcagggagacgggtgccagttttcggcttaatgcgggggaactagggcagccaggggaccagcgttggggtcaccaggaggaattagagggaccggggcccagccttggctcgggttaacgtcgaggcagcgcgaggggctggggaattcagcctccggggtccacaggagccggcggcgggggctggggcgggagtccacgcaggaccaggggcggtctccggcggggcggggcgggcggtggtcacgctccgggccagctggcgcgcggcggggcggggcatccgtgcgtctcctggtggctgacgtcacggcgcgggcgtcagtgactgttcggccgccaccgccgctgccgctgccgctgtcgctgtcgccgccgccgccgcccgccgccgccgccgccgccgccgccgctgccatggctcaatacaagggcgccgcgagcgaggccggccgcgccatgcacctgatgaagaagcgggagaagcagcgcgagcagatggagcagatgaagcagcgcatcgcggaggtgcgagccggggagcctcggagcatgcgcgctgcccaggtcccctggcggccccgcgccacgctccggccctggaagccctggggcggtggccacggagcgcgggcggcgcgccggggcaggcccctggctcgctgacttccagcagggcacacagaagcaagccagcgacagtctcatctgtgaaatgggcctggagccgggcgttctccgaggctgaggccactagctgatgaccggcctccggcaggagggagccgagccagtgtttctgttgggaggcacggcggggacgggcctctcgtcgcctcgcctgggcacccagcgtcctggctctggcccctcggccctcagagccaggcctctgccccctcggccctcagagccaggcctctgccctggtcctatggacaccgggcagggcggttcgtctccccctggagaggcggggaggcctgagccagacctggcaagtccactggccaggaggctccttccagaaccccttgcacctgtgaggcaggcacgaccctcccgggtgccagcggttcacccactgcttccgtgagtggcctgtgatggtggtggtcagggaaggagcgtggaggagcttgatccttttggggagactcactcatcaggactcggggctccaggggagagcaggctcctgcctggggaactggggaagcctggccagaggagccttgaaacaccaagtcctcatgccctggccgcactgtctgagccggggtgcccagcaagcagaaggtgtatttctctgccagccaccttcttgggagaccactggtcagcgagggcttgacatggtaccaagtgggttggggctggggccaaagagaggcctcctgggaagctgttgatgacattctggggcctggagggaggaaaatcactcagggaggggccaggcccctcaaccactctgttcttgtttgccctctcctcataacccttggcttgggtctcggaagcttcagcttaaaggctggagatgaaaaaggccaaaggtcagtagggtcggtggcttcaggctactgagggacctgtgatccccagcaggagacctgaagagccagagcagctcagggatggaaacagccccatttggcactcttagcatttgaagagccctgcccagcctcatggaaccttccatcgacaagggcacaggggcagatttggactataacgcaggtccttgatggccagcctgccatttccacagtgaggggtggttctcatggtggctgtcactccccgcaggagaacatcatgaaatccaacattgacaagaagttctctgcgcactacgacgcggtggaggcagagctcaagtccagcaccgtgggtgagcagggtgcgggtgcccctcacccgggccccgggccactcttccgctggccctgcgactaccttgccccttgtgcctccttgcttcaaaggtctcgtgaccctgaatgacatgaaggccaagcaggaggctctggtgaaggagcgggagaagcagctggccaagaaggagcagtccaaggagctgcagatgtgggtcctctcgccgcagccctcaacatggagctagtgcttacggggtcccgtggctggtcgggctctttttgcaccctgggggggaccctgtctccagctttgggacaggggtagcatctagcttgcgatttgcatttctctctcccgcctcctcgggtccacgctcacgtcttttcaccatggcggcttgtcttctttctgaccctctaaatgcagtgggccctttcccagcatccggtgcctgagcagcctgcgttctccccattgccagcctgtgcttggctctcccctgtggccctctgtgcttgctgtttgtaacagagccctcgcccatgagctcaaagtgatccaggacagcaggacccgtctggggcaatggggacccagcctgggctgggcaggccccacatagggcacacaggtggctctgggtcaaggaaggggctgggtcagggtcgggaaggacatgatgtgtgatggggccacctgcacctcactaggaagctggagaagcttcgagagaaggagcgtaagaaggaagccaagcggaagatctccagcctgtccttcaccctggaggaggaagaagagggaggcgaggaggaagaggaggcggccatgtatgaggaggagatggaaagggaaggtgagggctggcttgagtcggagccccgcccgcagcccctggggaggggtccccaatgtgagaggctgtcagcaaagctgatgccctgtcaagatggctccaaaagctgccctcttgaggcaccgcgcacagtagaccggggagggaagaggctggtctagaccaggctggctgggcacattttctgtgatgatggaaatgttagagtctgtgccacccaatatggtagccacttgccccaggtgcctcgtatgactggggcactaaatggtgaattctgtttgatttgtttcagcgtaaatgtatacagccacagaaattccgaggctactagtcagacactgcaggtctcagctgtgagaacaaggggctgtcagggaaagctcaggatggctggggagtgagggtaaagccagcctggcctccacgtgtgccacacacctgtgctgtgcctggccagggcacatagggtgctgtccctctcctggtggaagtcacgggtcaccatgcactgaagacactactcagggttactgctctgctcggggcccaccgggctaacccaggggtcaaggaaggaggggagggttgagttaggccctaaggatgaggggagttgcattcgccagagaggcaggaggggcgacgagaaagtacatgccagaagcccagcaggaaagagcttttcaaaacgtttgaagattgggagcaagttgtgtcacgggcccctggagggtgtggtggcagttctggaaattgtgtcacccagggaatggcagagggagagaagcgaggcaggggatggtgctgtgtggctgtggtaacaggctgggtgccatggctttgaggggagtgcaggattgtagggaggaagaacctgccagccacctgccatttgggttccatgttccagcagccacagtaaaacatagaaaaagaaacaagcaggattttagtatgacattgtatttaacccagcgtatccaaaatatcaccattgcggcaggcgcactagctgcaatgctggggtgctgtgtgcagcgggagctactggtttgtgtttgtgtttttgttttggttgttgttgtttttgagacagtgtctccctgtggcccaggctggagtgcagaggggcgatcacagcttacttcagccttgacctcctggactcaagggaccctcccacctcagccacttgagtagctgggactacaggcgctttgtatttttgtattttttgtagagacggaatctcgccatgttgcccaagctggtctcgaacttgggagctactggcgtggacagtgcaggcctgggggaaaggttgtcaccctcactgtgtgtcactggggcttttacaaaacactgcttggtgggctcttccctccctccacaggttccgtttagggggcccagccacaagaccccaggctctagaatctctgcccttgagcatcaggctaaagagtttagatttgtctttttttgttgttcttttcttttttttctttcttttttttttttttgagatgaggtctcactctgttgcccaggctagagtgcagtggtttgatcacggctcactgcagccccgacctcgcaggctcaagcgatcctcccacctcagccttctgagtagctggtactacaggtgcgccaccacacccggctgatttttttgagttttagtagagacgaggtcttgctatgttgcccatgctggtctccacctcctgggctcaagtgatccttctgcctcatcctccccaagtgttgggttgacaagcgtgagcctctgtgcccgccctaggcttgtcttctagatcgactgttctcaaggtatgcttgggggaccctgggcgtcggccatatcaaaatcatttttataataatgctatgatattcggcttccttttgttccagagatcaccacgaagaagagaaaactggggaagaacccagacgttgacacaagcttcttgcctgatcgagaccgtgaggtaaaggctgcctggccctgaccccggcctcgactccagccctggtggagacccttgcttagggagccaggctctgcgtgcaccctgagcagccctgggcctcacctgtctgcctgctccctctcccaggaggaggagaatcggcttcgggaagagctgcggcaggagtgggaagccaagcaggagaagatcaagagtgagtgtttgcggagtcagacgcgaggggcctgggcccaagccagcttccctgtccacagtctcctgggtggtgcgctgagccccaaggctgctctcagtggggctggagaccaagaggcagctctgccttgtaggtgaggagatcgagatcaccttcagctactgggatggctctgggcaccggcggacagtcaaggtaggcagcgtgcagcctgcttcctgctcaccatgggcccagcctccctcaggttccgtgggaaggaactgaccttcctgacttgggaagccccagggatcctgaggataactggctccagggcctggccccctgtctggggagtgaggcccaggcctggctgaggctctgcagcgtctggcagggccctctgggcctctgccttgttgagagcccttctgcaggcttccgccttcccttcccaactcctggattcccggatacagatgagaaagggcaacaccatgcagcagttcctgcagaaggcgctcgagatccttcggaaagacttcagtgagctgaggtgtgaggtgtgcgtgtgtgcacggtggtgtgtgtggcacctgtggctccagcctgggtgccagacacccagtgtgatgtgggcgctgtctgggcaagcaagcagcgtgctgggcactctcctcccaaaagagggggtcaggctcctcttcccttccctcccaccagaga

SEQ ID NO: 97424 - DNA, 85839 bp, Homo sapiens
gtgaattagccaaactaatgttttaaattagtaacaaactactacacttactaaatcaagtaagatgctttattattcatcaggatcattattttcaaaaatcattttagtaaataaaataataccactatgccctcacatagtatagtatttctcttaatttaaaaagaattggccgggtgcagtggctcacgcctgtaatcccagcactttgggaggcccagatgggcggatcacgaggtcagcagatcgagaccatcctggctaacacggtgaaacccccgtctctactaaaaatacaaaaaattagctgggcatagtggcaggcgcctgtagtcccagctactggggaggctgaggcaggagaatggtgtgaagcccagaggcggagcttgcagtgagccaaaatcccgccactgcactccagcctgggggacagagcaagactctgcctcaaaaaaaaaaaaaaaaaaaagcaagaatttcaggagttctgtaaaaaagccgtcaaaaagtgttaaatcttcagtgagcaatataaactcaatcaacctttgagtggcaatatactttccaagaattttggccttaaaaaatgagaagtagtagtaaagaaacatgtcttcaaaatgcataaaaactatcttgtttggttaatgtgaaaacacaggctatgcaaaatagtacatattgctttgtgcatcataaatatatatattcaaaaacttaaaaaaatgccaagacctttttaagttctatatttgaccttaaagaatatgtctccatttcattggccaaatggtcagacaggctgtatggataagggatgccaaagtaatcagcctcttcctgtagggcgatgcgggtttgctcatctgtgggaatctgaacttctccatgaaggtaatccaaaaggtatttaaatagacgtccatcacggtcaataacacaagcccctagaaaacattcagttcaaaaatgattatagagattctgtcgatcaataagatttcaacaaatcaaactaggtctgaggacctctacaattataaatgtttctttctcacatgaaagttaacatctagtgttcaaataggtttatgtaatctaagctagacttttggttattcaaacaccaaatatgatataccagcaaccctctgcttacaaataggtgatattgtaaaatagaatctgaatgagatgtgtgggacaatcacctgtagttctataatactgcacataagtttgaatgcaaatatatatcaccagggttgccatgtttggttgtactggtgtactatatacaccatgctaggccaagtgggcaagagaggctaaaaccaaacccacactctgctcaccaagccatgcaccctggcatggaactgcatcttcctggataaaagggcacccttttctgatttgtacacaaagaaactgaatgagtcagtggtggacctttgcgttctcactaccatatgggaaaatatattctgagatccatttagaactttggatgcaatgactatattcccacaatggccactgcaaaagctaagggcaccccacactgctggtagaaacagcagtttacccctaaccttatctcagctggactagaacaggtatatggaggttctcactaaagagagcatgtggggtgctcatcactatgtccagtgtttgcatatcagcaacactacacatctggggttcctcactccaggcatgccagatgattcgaattactgggttagtccttttgtactacgagaacccaaactttaaaaaagaagaaacactatgctggtactactttataataaaatatttttcttagataatttagcagaattaaaaaaaaaaaagagagaaaaacctctacatgaggctagtcagtaattcctcacaaaagaagggattaagaaggtaaaatttaggggcagagaagaaaactcaatccctgcttaccatctttgccccaacaacctttctgcccaggtagaaaccaagccctgggcaccagccactggtgattttttttcccattctttcaactgccatttaaccagcaaagcaacctcctaacaccagagttattaacagtaaaacagtccctcatgttcaagactcctcaatcattctcctctaacacagaaccaagagtgggtctggggctcatacacagggcaaaaaacttcatttgtattgatgaactttctttacaaacagtagcaggttcagtgagtaccagagcactggaagcagagagcagccccagaaccctacctgtgtgatttacagttctgaaacccagttttcagtccgctgcccctttgcctctgacggtatcactgcacagactttttctcagccgtgcacattggacacacagcaagactacacagctaggctaggtggcgagcccaacactaattctacaatgacgatggctgctctgttagcaataaggagggcagctgctttctccagacaaaacattttccaatttgaagaacacagagagaagcaaatatatttaatcagcatcaatatcatcacccaaagctgcatgaaagtaacaagtttcaaaatacagttaatccccataattaggttatgaccagcctttatgaactcttacttctttgtcaacttttaacattatcacagattttcagaagtagtatttaatttctccacgtacttaatgaatctccatagagtcctaatgatctcagtaattagtatagtcatctagtacatttcgctgtaattaagaaaatcaaagggaacttaaactggtgttaataaatattcagatcatgctttcagactttagacatttacctgactcatctgtttttagaggaaagcgaccactgaacatagatgccaacatggagtccttgaagcggcacaaggactcccgccgggctgtgtaaatacagccacccacgttcagtcggagaacatctagcacctcttcttctgccttgtggccttccatttctcccccaggcacctgaatttttgcctcccaacactttcagaaacttcaaaacaatgatgtcttggtctccctctgtaaaacaaaggacagtcatccccgccatttccaacaagacactaaatagataatataataaatatactttaacatgactgaaaataaattcctcagtactggcattattgaattgaaggattttatataatataagagaatttcgagatatgctaagaagttggaaaatgttggctaagaggatttgtaaaagataataaacgactaacaacccaatcattgctgttgaaatgactgtttaaacatggtaatgcactctctgtcacacagcaaacaaaggagaggcctgcttatgatcttcagtattcacatatctttttaaccatgataagtctgagggagcctctagactgcagagatcagtggacagcatggaattgagctgctaggctcttcccctcaccagctctaggatcttgggcaaattacttatcttcctcttccataaaatggaggcagtgatgatgcccagctcaaaggactataagaggaataattaaaagaatatataaaacagcaaaagagcagaatctagctcatggtaactattcaataaattataaatattatgcataatgatataaatttaaccataaggtgtctactgagggacttgatattgactctggaaatgtaaggaaataaaggagcaggaattattaacaatgataactataattcttaagttaggtaactaaggaatatataatttatcaactgagattataattcttcttttaatttttttaaatttttaaaaaatgagacagggtctcgctgtgttgcccaggctagtcttgaactcctgggctcaagcaatcctcctgtcttggccttccgaagtgctgagtatacaggcatgagccaccacgcccagcctgagatcagaattctatgtagaccagtagccaggccagtctagaactacaaataacacctccaaatcatccagcttcttcactgtgaaatggatgaagctttagggaagttttggggggtttttgtttgtttgcttgtttgttttttgagatggagtctcgctctgtagcccagggtggagtacagtggcgccatctcggctcactcccgggttcaagcaattctcctgcctcagcctcctgagtagctgggaccacaggtatacaccatcatgccgggctaattcttgtaattttagtagagacggcgtttcaccatattgggcagtctggtctccaactcctgacctcaggtgatccacccacctcggcctcccaaagtgctgagattacaggcgtgagccactgcaccaggcccagggaaggtttaagggttggatttttttaatccattctggagatcacagaaccacaagtgacactgtggtgttttcccacctaaaacaatactgtgatgaaaaaggtactcccaattattgagaatctgcagtatccacacatttcatagcaagttgaaaatggctgccaaaaggctcaactacatccatgtcaattcacttttactcagtgaacaactaagatcgttttgtagatgccagctagtctccaataaaatggaaggagaccattaaaatctgaggaagaccatgtgtgtagaatacggtcagcaacagaaaccattatgggccaaaggtccagccttccaaaaccacttatggatgtgacatctcgcactgcctagaagtcctgggagcagcactccaaagatccatgtgtgagagccacctctgaggcatgggatggaacttgttccctctgcctcattactggctccctggaatcctatctattcttcaaggccttcagcaaacctaatttcttgcatgaccgtcccacgtatccttctgccccccaagttagaatccttgcacaattctacaaatatactgtgtgtctgtccactttttaccccacttgtttaatccctactttttggtctgtaggccaaggaagccagggcctgtgtcactcttaataactcccatttactgaatgcttattatgtgccagccattgtaagagacacttgacacactttacctaattcacacaaaaactctattggatgggaattactgtccctgttgacagatgaggccattggggtaaaaaaaaagagtgatgtgtacaggggccacacaaggactgactgctagtaggttgtggagccagccccaatccagaacggcaggacgaaccccaagttcttcctgcttcaccccacaccgcctcctccagcactgtttcacccctatggatcctgacccagccctttcactctctaagcatctgtccatctcaagacttggctacgataacacagcagcaccccgatcccgaggatttaagagctactcctcctaccccaaccccaggcagtctctcctaaggataggaacatcatcattccaaggccacaccaggggggcactccgcaggccccatcctcaaaagcacccagttaggctccctgctatgtggaaagtgtccagccctcggggacaatgtcccccagagtgcattcctatgatcacctgcatcaaaaccatcagggacgcttgggaaaacgaagacactccggccacagcacacagttcctcagaaagtctgaggaggggtcgggatctgcccgcgaaccccactttgaaaaacatcgctcaaggggctcacactcctcttccgaagcgggaagagccgggaggagctggggagccagaaagccccgccacggtcttccgcggcctggagaccccaaatcggcccgaagcccgagcctgcagcccggggcgcgcgcgttaccagcgcggcccgtgcccttcctcagggcgccccgccgccttccgggcccgcggcccatcccgcgcccggctcttccgcaccgggggggtggggcgggtcggcagcttcccagactgacctgcggcccgccagaccctcggcgcggccgccggacgccgcggggcggacgcggaagtgaacgccttctcagctgctcggcaactcgggagcagagcggccccagcggcgcccccgtgcggcccggctctgaggcagcggctcagggagggagggaggccacgtcccgggcacgccacgccacgccacgccccgcccccagattcgtctcgccccagtgggccgcctcggagtcgggtgggtcttccatcccggaggtaagggaaacacacggtagagaaggccagggctgaaccccaagggacggtcttgtgtgttcagaggctggttttacaggtgaagagaagaaacagccgcagaagttgcgattgtccaaggtcacttaataagtrgcaagaattaggatgttaagtgttctcacccccaggtcagtgcccatccctccaaacagggctgctcagtgccmacgtgtgttaatatattgcacttggataagtctatctggatagtgtctgcagcttacaaagctttttcacacacagcattcttgtttagtctgtgtgacagtgatataaagggtgatatttatttcccattatagcaaggaaaattgaggcgagagcaaacatttattcaacacttttgtacacctgacactgtgctaagtgctttgcatgcactacttaatttcctgttaacgataaccctaaaacagttcttccagtttctagcaccatcttaccttgtgcaaggtactgtgctagatatttcaagagaaatataacagtcctgttttcaaggtgcttccccaaaatcaaaaatatttggttccaaatttccctgactggctcttagaagagaataagccaaagagaggtaagtcaacctatccccttagatattaacagtcttaggagagagggaaggtttgttcaacctgtaattattaagcactagctatggagcaagcactgagagtaaaggactggaagagacaaataatgggcgttcaaccttactttccagtacaacatgcagaaaacttgttctgtaaatattttaggctttgtgggccatgcacaactactcaactcagcagttgtagtctaaaagaaggcataggcaaaacctgaacaaatgagcattgctagttccaactttatggacactgaaattccaatttcacataattttcatgtgtcaaaaaatattcttttaaaaatgcagctttttcaaacactkaaatatgtacaagccattcttagatcatgggccagacaaaaacaaatggtggtccatgggccatagtttgcctgcccttgttcaagtgggagaaacagacactaagcaaagtggtgacagagagtgataactaggtgcgaggaaatgagtggacatttaagttgagggctaggagtcagaatgagtccaccttctgcagagatggaggaagggtattttaggaagaagggagagcaagtcggaagcccctcaggcaggaaaggactcagcaatttgtaggaagagaaaggccactagtatgtctgagccttggtgggcatcaggacaaaggggaagatgagatgggatgaggttgaagagagaggcaagagcccagactctaaagtattgtgtggccatggtagaaatttaatttgactgtaagcataatgagaagctattgaaaggttttaagcagggaagtgacacaattgatttactattaaaaaaaaataatcactgcagctactgagatgagaatggattggaaaggtgtgagatggaagtagatgactattgcaataatccaggggagaaatgtcttagttcctccttgagtagtgttggcaataaagagaagtggatggatgcaagaggggtactcaggagatagacatgacataaaatttgttggtggatcaaatacaatgtgttaatatggatcccctgagaagcaaacaatattatcagattagacatgtgagagatttattgaagggaacacctgtgaggtaataacagggaagcatctgaggggaattaggaaagacattagacagtttcaacccttgtggagaacaggaaaggaaaagtaggaaaagttgtagatatgatacagttctgagaaagtttcagcacagccagtggaaagccttcaagccaaagtcccccatatcagaagagttctgtgtctcccaggaatgggcctgccttaaatccctctgctcagtcactggctgggagcagtcagtgggcagtgcagcctggtgataaatttcaaaggacagcagctgaggcatcagtcaacaatgctccctgcaattggagatctgagaagtgcattttcatggctgcaatatatgggatttaagggaaagggaaaaatgtaggaatatctctaaattgttaatttgaacaatgggataatagtgagtttaccgagtcagtgaattatgggagaggaataggtttgagggaagaaatcagaagctgtgttttggactactaagattcagatgcttttcagacattcaggtagagagatcaattagcaattgaataaatctggagctcaggggtaaaattctgtgttgaaggtggatatttggaaagcataagcatttaaagctatgagagtgaatgaaaccatctgcagaaagggcagataaatgagaagagacaacatgaagcattgacttcagcatttagaagtcaggcttacaaggaagagccaagaggaaggaggggagtcaggagcgtatggagttacaggaaccaagagagcaaagtgtcattcatgtcaaatgccactgagaaatcaagggtccatcatatttggtattgtgggagttctaggtgaccttgacaagagcagtttcaatgttgtggtgaggacgcaaaccagccaaaaatgggctggagagtgaatgggagatggaaggctggatgtaaccctttagagaagactttgttgtaaatagaagtagagaagtgaagctgtagtgaaggtgggataagagtcaagaaaaggaattttaggatgagagtcattccagcaggttatgctgatggaaatgattcagtagataggcagagattggtgaggcaggaaggggagggaggggacaaccgaagaaatgaaatacttggcaaagcaaaagggtgttggagccaaagcacaaattaagcaattttcatttgacaagagcaggggtaggaggtaaaacacagaagacagatttaagttcaactaagttgtagatttcacagaggagagatgagaaaagtctgaccaaatggcttctgcattctctatttagtctaaagcaaggtcaaaggctgagagtaaaggagatgaggagtggaaaaggtgtgaagaaggagcgtaaggtatgaattatttatcttgggaactgaaaagcaaactttctatagaaacttggtaggattgctaagaagggatgagtgtccacttgaagattgtaatcattataacatggatgtcaagctagtcatcccagttatatgacttttatccagcaacattcagcagcttcagtacaggtgctgagaaagtagataaccctgggctcagccggagttgggatttagccaggtagtatgacacaaggattggttaccatgatggatcatcgattctaagatgggtaaagagggaagtatatgaatgtggtgatgcatagtgaaaaggtagtgagattaatggatttgagatctcaatggagttgaggaatttttcaaataggaatactagagtmagtgagctagaagaattgaaggcagtggtcagagagtatacttgaattcaagatgccagaagtcatgcaatgaatgtagtgccaaggctctgggctgagacggggtggaaacaaagttagtagaggtgaaaattgtaaagaaatggcaagctaggttgtaagatgggttatcaccgtaaataaatacaaagtcaacaagaatgagttggcatagagagaaagatgatgaaatggaagccattgttaccaataactgatcatcaaaagagttgtagaaaactgcattgaggaaagaaggagagatcctctgtcctgaggtatacatatagttaaaattacctagggcttagaaagacaaagaaggaaaagtgtttggaagcactattgagagaaaacgaaacgccagctccacctcctgattctggaatatggggggagtggaagaaaaagtagtctccacccaagaagtctacagtggaagcaggacctctaagaacagacaactttcagttaaaaaaaaaaaaaattaagcaatagtaacattttagccaggtgtggtggcatgtggctataatcccagctacccaggaggctgaggcaggagaatcgcttgaacccaggaggtggaggttgtagtgagccaagatcacaccactgcactccagcctgggcaacagagaaaaagagaaaaaaaaagaagaagaaaggaagaaagaagcgatggtaacatttaaaagtgaattttaaagggctctgtggagatgtttggaagcaatgggaacagtggagaattggcttataatagtggacatatcagaagtatgaggatgagggccccaggtaacagtggacaacttggggaattgggactgctggggtgattatagaacacagggtctagacataatgagaaaagtcctaatggtctgttaatgcaaggttcaagcaaaggccaaatatttaactcaatagcattggtataaccccattttctgactgctttcaattgtatggtggactgagggcagggagggtcttatgtggaactgaagcatcaggaaaatcctcgggtgactactccctcctgcagctctcctggaaggaaagaacaatcctagctctggtgcacagaaggttgaagggaagggggtaaaaaagcagtatataactcagaacctgagtcacacacctgattagacttgagactgccctcctcttctggcactctttaagatgggaaagataggtacttgtcatggtaaaggagaagcaaataactttgcgactgtcctccaggaaaagattcccaaaccataaacgcattcctccttcaaacccaggacaatgtatgggagaatgaagggtctggttgcttctttgttcacaaaggctagataagttgggacgtttttctttttgcaatgcctggtgcagagtgtgcagttccaccaagataacactgacaggacaatttctgagcagccaggcaatagcagctatagctgcataaatctgaatttcccaattcattctctgaaaaccacactacagaacaataaaaaagatcaaacaaaactgcaggaaatgcatgccacctgcataactaaaagagaatgttcaaatttcagtatacctgtaagtaggaagtaaacatccagtctcaagtagctgtgtctcaagatcttgccataaactttcacagagatacagttctgagaaacagagatacagagcagcctggagaaagtgaatagaagagagaagaggagagccattgacaggcctgtgattgatctaagaaaaccagaaaaaagagaaagtccatcgtatgtgctaacatactggaaaagattcctaggagataaaaccacttgctatatatgttttcttaaagtgcgcatgattcatgggaacagtctatgaaatgcattgcttctggaggtacagaaggtaaaaaagatagagaggcaccctttgaatctaaatgaagaggaaaataagtaaaaagaaattttagtgccaagtaaatgagtttcaaagcttttttgtcttgttttgttttgctctgttgcccaagctggagtgcaatggcacaatctcagctcactggaacctccgcctcctgtgttcaagggattctcctgtctcaacctcccaagtagctgggattacaggcatgcaccaccatgcctggctaattttttgtatttttagtagagacggggtttcaccatgttggctaggctggtctcgaactcctgacctcaagtaatccatccgccttggcctccaaagtgctgggattgcaggtatgagccactgygccgggcctcaaagctttaaaaatatgcaatctttagctacatacacatgcatgtgcatgcatgtacacatgcaaaagccatccattgacaaactgtatttcactgcagaagagaatacccttgaacttgaaatctcataaaccatatcaaatctttgaaatgaacagatgaygtattattcaaggttttccagataaaaagaaccaataattagtatgtgcatatatatgtagatatagatacagatatacagatatagattagaaatatgcatttaatataaagcattggctcacacaaatatgaaggctgagaggtcttatgatctgctctcttcaagatggagacccaggaaagccagtggtatagctcaaaggcctgaaagccagagaactgactacacaaattccaggctgaatgtgaagacctgagaaccatgagccctgagccagggcaggtgaaggttgctatgcctgctcaatacacaggcagagacctagcaaacacactggggaggtcagtctgctttctcagtctcccaatttaaatgctaatctcttccagaagcactctcacagtcatatccagaaataatacttaaccagatagctgggcattccatgatccagtcaagttgacatataaaattaactaccacaggtgaaaacagagtaaatatatacaaaaccattataagaagaaaacagaaaacaagaccgtgtcagctgatgaaaattctcctctccccccgaaaagaatccaaagcagaagaaaactgacataaactccaaagtgaagtaaatatcttcaaagaagcttttgggaatatgaaaaaaacaccttgaatcataaattttaaagtaaaaatggacaaaaaatgggaagaaataaaagagagtgtgttagatccaagaaagaaatataagaaaaagacaaattactgcagaagtgaagaacaaattgcaaagtttccagaggaaaagagaattaaataaaatcttaataagggacagggaaataaccaagatatgaaaagaagatacaaaactaaaagctttgagagaaaagaagtggttgaaatggaagacatttcagagagaartagttgaaatggaagacaggcaaagaagaaacaacatacaaattattgcagtccttaagggatatacacaaacaacaaaggaacagaactaatakttgggaccataatccaagcatgtttcaggatataaaagaatatataaatctatataccaaaaggactcatcaattatgtgggaaaattaatccagaattgtcaactctaaaccatacgcaagtaaaattattagatttcaaagataaagaaaaaatccccgagatctccaagggaaaaaagatcaagaaattacaaggacgagagaattagactggcacaggactgctcaaaaacaatatattaacaaggcaacaatggaacagcagtttaaaaaaaaagctcaaggaaaaaagtgtgaatcaaggacttccaggcaacccattcttcaagtattaaatatcaagccaagaaaagatgagttttaaacatgaaaaaatttagggaatttttaatacatgaacccttcttgaagaatctttgaaaagatgatttctgctcaaccaagtagcgaaactttctcaaaaggacagatggtgatcatttactatatttaattgtagacctaagactaaacaaaggtggggacaaagctaacaaaatattgttatatgttgatatggtttggctgtgtccccacccaaatctcatcttgaattgtagctcccataatccccatgtgtcatgggagggacctgttgggaggtaattgaatcatgggggtgggttttttctgtgttgttcttgtgatagtgaataagtctcacgagatctgatggttttataaagggcagctcccctacacatgctctcttgccttccaccatgtaagacatgcctttgctccaccttcaccttctgccataattgtgaggcctccttggccatgtggagctgtgagtccattaaacctcatttactttataaattacccagtctcaggtatgtctttattggcagcatgagaacggactaaagcatatgttgtatgtagtacattctgacaaagtagaaataacacaactgaaaatgggaaaagggaacaagaaaaaggaaaatagaataagcctaccaattgtgatataggcaatggataggggttaagggacaatattaaaattaaaaagtcagataatcgaaggttaaataaaaaagagggaatgaagtttcttgaaaaaggtatagtacaaagataaccagtagaataaaactgtgagctttcttaaatacaaaaaaattttttaaaattaaaatagcaaaaaaaagtgtcatgcaaagaaagaaacacagcaaataaaacacagttttaagattattatagtataaaatatgtataacaaaataagttgaactgtcatattaatgagtatgaatgagtttaacttatctattaaaagcaaaagatttccactggacatgctcattcccataatcctagcgctttgagaggccgaggcaggcagatcacctgaggtcaggagttcgagaccagcctggtcaacatggtgaactccgtctctactaaaaatacaaaaagtagccagatatggtggtgggtgcctataatcccatctactcaggaggttgaggcaggagaatcacttgaacccaggaggcaggggttgcagtaagccgagatcatgccactgcactccagcctgggtgacagagagagagactctgtttcaaaaaaaaaaggcaaaagagattttcaattttgttcacaaagcaagatgctgaaaataagagacatgactgattcaaaatgattcagaaagtctaaaaagggatgggcaaaagtacactagacaaatggaaacaacaacaaaggaggggttgtgatactaatgtcaagataaagtttaaaccaaaatgcattaaatgagacaaaggagggcatgttttcatgccacagttcacaatggatatactacagttacgaattctgttcaccaaataactcagcagcaacctttataaggaaaaactacaggacatgcaaagaaacactgatagaaacacactaacaaaaagacttcaagacactaccttcagtacaaaacagactcagtagccaaaaaagaggaattaatgtagacctaagtcgtataagcaataatatagatcttacagatacacagccatgcatcacttaaggatgggaatatgttctgagaaattcatctttatgcaatttgattgttgtgtgaacatcatagagtgcacttacacaaatctagatggcatagcctactatacacctaggcaatattgtatgggctattacccctaggctacaaacctgtacagtgtgatactgtactgaatactagaggcagtggtaacacaatggtattcgtatatctaaacatatctaaacatagaaaaggtatagtaaaaatatgatataaatgactttgaaaaatggtacacctgcatagggcgcttaccatgaatggggcttggaggactggaagttgctctgggtgagtcagtgagtgagtggtgaatgaatgtgaaggcccaggacattactgtatattagggtaggctttataaacactatacacttaggctaccttaatttatttaaaaaataaaggaattgtgctatgatgttacaatgactatgatgtcactaggcaacaggaatgttttagctccattataatcttatgggaccaccatcgtacatttgtttggtagttgactgaaacatcataatgtggggcatgactataattattttatttctttctgttagacaaactgtttacaggagataaggaagttttggtttatgcctaaataatttcacttaccttagtttttactgaaataaaagcatagaagttttaaatgtagagttgcctttcttttaaggaagcaaatgttttgaagataactgtccaacatttatgtgaatgtgaaaacttacaaagtactctggttttcaaacttatctatgcctacaatatctggtctttcttctcttcttcccaccacaaaggaaaaggagacccttcagctcacagcttagccctgattctaacccctgcctcaccactactaactgctttcctatgtcagcctctctccctctacaagctcccttatccagcttttaaaaagaatatgtgaaccccaaaaatttgagacaggtctcagttaatttagaaagtttattttgccaaagttaaggactcgggcctgtgacacagcctcaggaagtcctgatgacatgtgccyaaggttgtcggggcacagcttggttttatacattttaaggaggcatgagacgtcaatcaatatatgtaagaagtacattggttccacccagaaaggtggggacaacttgaagcagggacagggcttccaggtcacaggtaaatgagagacaaatggttgcattcttttgagtttctgataggcttttctgaaggaggcaatcagaatgtacatttatctcagtgagcagagggatgactttgaatagagtgggaggaaagttttgtcctgagcagtttccaccttgacttttccctttagcttagtaattttgaggccccaagattttcctttcacaaatacaaacccyccctccaacctcattcccctgtagctattgttacttctttcttgatcctcaaagaactgtctattctcatctctgcatcctctctgctgcaaaaggaatgactccttaactgtcaaaccccaggactgttctcactcaggtcttcctgctgcttaagaccaggttggcagtcccttcccaaccatcattcctccctcagccctcccacgtgtctccttctacctctcactgcctctcttgctgccttttcatctttcctccattcattgatgttcaccgtgattctaccttctactcttcttgtgcctctacacactcttcctccacaacttaatcaactcttgtgatttctaattactatttgctgctgactcccaaatctgagtatcccttttcagctccatatttcttatttctgtgagcctactggacatttctgactagatctcctaaatagcagagttattttccacagctgctattcctttgcattttcaatgaagagtggaaaagggaaggctatatgatgaggaagggtatgggggtctctgggaccccatccagcagccagggaatgtccatatggaaataactctggagacgtgggcttcaggaccatgccagcagcgtggtacatgtaactgtgagtccactggtaaagccagtgagtacagcagctatcttttcaggccccttcctcaagcctccactttgtatggtttggattttatgagtggagatattgagtaaaggagtactttaagcttttcggacttcctgcagaggcacagggtggaggctgagaagtagactacaccccagtctctcagtgtcatccaacatctggactggagtagtgtagagaaaaaagtcgccatgagaaccacggctagaggttatctagctggacaagtggtagaccaagttccctgattattttatccctttccagacaagcctcccttctacacacacatacaccttggtcagacataaggaagcttggtgctcctgttacatattccctgcccttgcctaaaccacagaaatgttcttgaatcacctcaaggctcaaagaccccttccatctatccccaacatcgatcctggattttctagagttaatcggatctttatcactcccttttcttaaacttcttgagagtttaagcactgctccctcccctacacccaatgctttccttcattgtccacacaaagtaaagcttcttagcgtgcacccaagatccttctgttacttgactttgtctaacctctcagcctttgctccccctatctgaccacatgcgtcctaggccccagcagctctgaactgcttcctgggacaggctatgtgctgtcagcctaatgaatcccacccaacttggccttcgaggttccaccgctaagtgacttcccctgaagatttgtcttccctcttcttttaagagctgctctttgtttcctaaatattctttctttctttctttctttctttctttctttctttctttctttctttctttctttctttctytttctttctttctttccttccttccttccttctttctatctttctttccttctttcttgagacaagagtcttgctaagttacccaggctggtcttcaactcctaggctcaagcgatcctcctgccctggcctcccaaaatgctgggattacaggtgtgagtcaccgcagctgtcctgtttcctaaatgctttgatggcatcttttgcaaacctcacttaacatctacatatcacaatatacaggaatggactgtttgcttgtctactgtctcccaaaaggaaagaacatttgcctcatccatctttaccctcagcaaaatgccaggtgcaaaggggctcctgataaacgtatattgaagaaaaagaggaggctgacaagcaggaaacatgaggaaattagcatgatggataccatgcctcaaaaccaaagtgacaaatgacaaagtaattctctcactatcttgagaggctcaggccaggctgcctgggttcaaataccagctgcaccacttaactaaaccttgtagaagttacttaaatttttggtgctttcttggttccacccagaaaggtggggacaatttcctcaactttaaaaaggaaatratggtacctaccacataggatcattttgagaactaaaaaggcatttaaagggcttgacacagtgtctaggacaagataagcccttaataaatattatctgctgctgttataatgattagctatccatcacccagcacagcttatttaactggtttctattaaataaaataaaagtaattattgtagtaaagttgcataaaatactgaaatgaacctttgtcattcttttggccgcctagctcaaaatgcacttcctgagtttgggtaattcctcaccttatgagtctgtctaggttacctctcactaagaagccaccatcatcataatcatcatcatcatcaacacaacaacaaaagccagacacaggctgttcaggactcccttgcagcaggacttgtagcatatgattcaggtttgacgagtcagacacacccaaaccaggtctagcaacaggagctagtaatgccaagcagcagtgatgggaaaactgcagcacaactatgcccactttcccatatgcagtggtggtcccagtggtcccagcagcagtggtggtcccagtggcggcatctagtgccactgttggctgtacaagatcagctgcatcctcaaagggctatttttggtagcatgaccatggctaggtgctcgtctgctgccaagctccccttattttccaagcctgtatctctatcctacccagaaatgctttaacccacccaatattcttttctgcttctatcagcctgggttaattttccttggtgcaattcatcctgccagactggtacagatgatyaggtcagatggtttcataagatgtaagtacactccttctactttgttttattgctttattgatttgcagtgttctttacttggctcctgctcagggactgttcttggatgatttttgttttagtaatgccgatatgttaaagagggtttttctggtttttgttttatggcaattacactttctctctttcctttccttcccatcccttttttggtgtgagtgattgtgtcttaggacaatcaaattttaattgactggaatctatgcttaggtagagaaaatcaggcaactaacaagtataagaataaaggaaaacagatggagaggaacaaaatcagtgcccagtgcaggagagtatcacaacaggtctgtgagctcatttaatgtaactagtttcttttacagataaaatacttgaaacaaggaacacacagctaatggctcagccacaactataataactgcatctccagacttctcatccagggctcctgcctctatccattataccaagaggcaaaaggcaaataactaaaaagcaagctgagatcacgttaaatttaacccgactaattatactttyaggtttatggttgtatatgatactaatttacattttcaagaggttttacaatttacaaagcagttaaatcctttcaactgctctgagataaggtagcactttttttttttttttttttttttttttttttgagacggagtcttgctctgtcgcccaggctggagtgcggtggcgcgatctcggctcactgcaagctccgcctcccgggttcacgccattctcctgcctcagcctccggagtagctgggactacaggcgcccgccaccacgcccggctaattttttgtatttttagcagagacggggtttcactgtgttagccaggatggtctcgctctcctgacctcrtgatccgcccgcctcggccttccaaagtgctggcattacaggcgtgagccaccgcgcccggctagcacttttttttttaaagaggtcttggtattcatgtcttgataaatgttttagcatctcttctacctctgattttcctgtctcccttttctatttgttttggttttgaagctgtaactacaaaatgtgtccattgggaagagagcaatattaatgtatttgaacaaaagggcccattgattgaaaccatcataaaaatatatgggatgctgtttaactccattttacaaataaggaaacagaagcccagagagattaagtagtttggccaagattaaataaccattaaatggcacagtcactacaaggttcatttaaaaaaacatataacatacattgagcatttaatgtgtcaggctgggtaaacaagatatagtgctagttaactcctaggtaagcataaatttctataaccagtatattactttgtaaaccactgtcttctggaattttagcagctggacaatcagtaaatacttttctacttacacaagattcatgtaaccagatctgtttggagactgatcgtgatttatattagactaaaagatcttaactcaaaagcatgttttgcatcatttgtctagattctttaaagtaaaaatggaaagctgtaattctcaaatgtcttcgaatgaacaaaaaattgacaagaatatgaagctgactgcattactgtatcatcaattattggaaccttgatttaacaagctattttcattttcagtccaatggcatacaaagaggaaattttattctttgtagtttctccaaattctttgtaaaaattatgaaagtaatttgcgaaaaataagcgaattgacatggaatataaggtgaataatacatttttaaaatgtagttgtgtataatggaaaacgtcattcttgtatattcagctaaaacagaccattagtgcaagacctaaatattaatgagatccggggtttgcaacgaaatgtcattgctgcttttcccccagaaagttaaaagaaaaacggggagagcttttaagtgaaaactaaatgtgctggcgtcacacttggaaatgcaaggatgcagaagaaatggtaagatgtgggtgggtagtatcccagtaaacaacataaaccttctaacagacttgaggtggctgtcaagcctttcagacatgtgattgataatgaatgtcagaggagagtttccttttccatcaacgcttcaggagacagcggaccgccaccaacacagggcggaagagcacccctgtcacgcagactgkgccgcccccggctcgcctgggcacgccccttcctgccctagcagcggcgtcccgccctttccgcctttcacttcctagtaaccgccctcccttgctccatcttcgcaggacccgattggctgatggggcaaccgccaacggctgtggcgtttaaacccaagccgcagccgctgctgctcgccgagctcccggagctgggtgggggtgccccacgctgaaagagaggtaagttagtggcctgcggcagttgacgtgaccgccctctccctgtcgggatcggtgtcgttcttgagtcggttctctaggcgctgtccgcctcggtctccggctcgtcttccgccctctgtcctccgggatccgggacggcggcccctctccggctacgaggggttcgttgacggagtcctgttttggctttgagtcgctgcctcttgtttctgagatttgagcgtccggcagggcgagcggggagagccaccagttaggtcagctacttaagggaagatatttctgtctctgggactgctctactcccttgaacagtttctagggcattgtgagcgctcagtacgtgtctgcggaatgaatgttagggactgcgtgccaaagttctcgaaggagccctctcgtttggagaggctggctgaaggcgaaggggtgatggaagactagggagaacttggaacttagaacttgagctgcttgatgtacaggtaggatttcagtagagaatagggacartgattttttagatgaggtatccaattcaggagaattggatgtggaactgagtatttcgtatttagagatagtcgagatgctggccggacaagtgtcacagagtgctggtattgagtgctgatagtttaccaggtcccgtactagacactgtacatacattggctcatttagtccctacaaggagatgcccttattttttatggttttataaatctggaaattgagacgaagaggtgttgagatcacatagctatgaaacgttggaactggagctccaacacagttgtaatcactatcataatgtctcagtgtctatatggtaaatcaccctggaacagtaccccaaatgcctggttctggctcctaaagtttcccttggtgaggtcattgatgtagggggttgcagggcagtgtcaaggaacactcccagatttctggcatgaggatttgaataggcgattgacagtgtcgtttattaaattaaggaattgtgtcagaaccagcttattggggagggcagtccagctgtggtttcctaattagtaaagtgagatttgatattccagactggattttttgggagatgaactagatttctatgttaggatccctttcaggtgtgtgagatgcaacagtttgtggggagtttctgtgttctactgtctttgagatagatagtgatctttgattttaaagtttcttcctggcaaaacgtttaaaagaactgttgagccttaatcttgaaaggtttctggttcaacttattccccattgcagaaatttcttctaaaaccatctttccgttatttgcttgacacctcccaacatctgcttaacactttcaaaggagacccattccaagagtgggcggtttttctattggaaagttcttccattcattcatagtcacttcttccacaaatgtttatccagcagctgctatgtggcaggcacatttctgtactaaggtacagaagcaaacaaatttgacaaaagtttatgccctcattgaacttacaatttagtaggagaaaacagataataagttaactatttaattttatcttagacattgataagttaacggagaaaaataaaacagaaggggagaatgggggtaagtgtgcagtttttaagtagtttggactgggaaggctcactaagaaagtgacattttggcaaatgctcgaaggaagtgagcaagccctgtggtcatttgaaggaagagttgatacaaagggaagaaggaataaaagtttctgctttagagcatgtcaaggtaggcagtgtggccagagattattgagcaagagaaagattaatgaaaaggattagaaaggttcactgatgattaattggggaagagaagtgtcaaattgtatagtactttctaggccattttaaagattgagtgagatggaaagctactggagagttttttttaacatgggagtaacatgaatttacttaagctttaaaaggatcattgtggttgctaggttaagaatagatagtcggggagaaaatggaagcagggacaccattcacgtagctatagcaaataatgtacatgggasagaatggcaacttgaatcaaagtggtagcagtagaaatagtggtaagtagcccaggtggatatattgtgaaagctgggtcagcataattgatcatagaatagatgtgggatatgaaaggaactttctgacctgagcaactgaaagaatggagttgtcattaagtgagctagggaggacatggtggagtaggttggggtggggggagtttaggacatgttaaatttgagatgtgtgttagaaatcctagttggagatgmgtagtaggcagttggatgaataaatctggagttcaagggaaaagtctagattgggaacacaaatttgagagttatcagcatttagatttaaaagccaggatactggctgatagtccagggagtatatgtaaatataaaagagatgagatccaaggactgagatctggggcactccagtggtaagaggttagggagatgaagaataaccagcaagagggactgagaagtggtcagcgaggcaggagaaaatcctgcctcagaacaaacagaagaatgtgctattttgcaaccaagtgaagagcgtatttcaaaaggaaggaatgacttgatattaaatgcttttcacagatcaagtaaaaagagactgggcctgaccacagtatttgatttaacaacatagtaattcagtgaccttaatgaacagttcccatatagtagtggtgagagcagaaatttcattgtagtggatcaagagagactgggaggagataaattggagacatcaagtatagacaactctctaaaggagttttgctgtgaagggaagcagggaaatcaggtcatagcattccagcatcaagggaccacttgtattttcttaaatgtttcattttcatgcatttacacatgccattctttcttcctggaatgcccttcctaatcttgatgcctgacaagttyttagtttctaagacttacttattcattcaacaaatatttactgtgttgatatcatttgtaaggcgctattccatgmgctggggaatatatcagtgaataaaacataaaaatccatgacctcctagaatttaaattctagttggggaagacagacaataaataaatctatagtatgttagatagtgatagatgttgagggaaggagctacagttttgtttcgttttgttttgttttgttttttgtttttttgtttttgagacggagtctcactctgtcacccaggctggagtgccatggtttgatctcactcagctcactgcagcctccacctcctgggttcaagcatttctcctgcctcagcctcctgagtacctgggattacgggcacctgccaccacacctaactaatttttttgtatttttagtagagacgggtttcaccatgttggctgggctggtctcgaactcctgacctcaggtgatccacccacctcagcctcccaaagtgctgggattgctggcatgagccactgcacccagcctggagctacagttttaagtgacctcactgagagggtgacatttgaagagacttgatggaggagagtgaatgggccatttgtatatctggaggaagatgtttctaaacagcatttattctaaatgcagaataaccagtataaaggacctgaggctgaagaatgcctggcatatgctccaaacagctagattttggtggccagtatggcctgaggggaatgcgatagagggagaggaggaggagttcaaattagagaagtgtagagctagtggagagaccgtactaaggactttggagagaagtgggaaccatgggagagttttagattgtatagattagttcactgtagggacagcagcagtggaaatagggagtcaaagcctgttgcagaaactcaagtgagacatggtagtgcctctgactaggttggcagcaatggacatactgagaattggtcagattctaaatatattgtgaaggtaagttgagatatgagagagatttttggcctgagcaactggaaggatgaaattaccatgaactgaaatagaaaatgctctgagtgaagcaggtttggacaagttaaatttgatgcatctactttagttattmaagtggaattgtggagtagacagctggatacatgaatccagtgttcaggaaagagatccaaactgaggacataaattatggagttcttggcatctggctggtattttaagtgatgagactgtatgaaatcaccaaagaagggagtgtagataaagagaggaagttcaaggaaagaccccgttagaggttggaagaacctgtaaaagagacagaggaggaacaggtaggtaggtaggtaggaaaaaaacataggcgtttgatgttctggaagccaaggaaatacaatttttgaggaaggagaaattaaccacattaaaatgctgctgatagatcaagttagatgaagactgagaattgactattagatttagcagcacagaagtcatcagagatcttggaaaaaagcagttttggtggaatagtctaagtgaaagcctgattgaagtaggtttatgagaaagttggaaactgagtatagacaatgttttcaaggagatttgctgtaaagatctgcagagaattggagtggtagtctgagtatgaagtgggaacaaaagagggttctttaaggtgaggaaatagcagtgtgtttgtatattgatgagaatggtccagtggaaaaggaaaaaaattgatgatatcgggaaagaattgttggagtgatgtctttaaggaggcaggaaggcatgggatccagtgcatggatccgtatctaggaacacagttgatccctaacaacaggagagaaaacagatacacagatacaggtatggtatgtaggtaattgcaatggaagttttgagaaagttctccacaggttgcttcagtgttctgagagagaataacaatgagtgaggatatgaaataattcataaagaggagtgacccagggattgataacagcagtgaagggaaaggggtaatagagtctagtgacagtatattcaaggatgggaatttttagggaggagggaagatgaatggtctgcagacatgaatgtgttgtagcctctagaaggggtgtgggagggaaaacagcacctgcctgacaggactgcaggagaatctgtgtcctcaggggagagggtggttcaagaagatgaagggaacattcagagaagagattgaggctgtagaggtttggttgatgatggaatgtgagttctagaggacctcatgagtctggcaagggtaagataggcaggctgtattcatttcctttggctgctgtaacaaattatcataaatgaggtgcttaaaacaactgaaatgtatttccccacagttctggaggccagaagtctaaattcagttatcactggttttcccacctcaaggtgtattcccagctgcactctctctggaggctcttcaggagaatctgttccttgctttgtcaattcctgatggctgctggcagtccttggcatgtggctgcatcactcctgtctctgctgtctcttgtaaggactcttgtgatagtatttagtcctgcctggataatccaggataatctccccattacaagatcctcaatttattcatatcttcaaaggccctttttccacatgaggtttagaattaaagggatctaataactttgggggaccattttccagcttaccacaggaccagatgaggaatgtgtagcacttaggggattcgagtgaggggaatgaacgtgacccaggagttgagggattcttgccatgattgatawagtgagctgagtcctggattgayrtagtgagctgagtcctgtggactcaaggcaggtagtggtggggaggctgagtattgagggttaggcaggtgcaggtgacagagttttttkttttttttttttttttttttttttttcagatctcttcagatggaggcaaggaggcttgggaaggaaatggaggcatggggaggttggtcttacatggctcaacatcaactgctgcttctcagtgaagctatttctgatccttttcctctgcccagtcacagttaatcgcttctcctctgcattgtgtattgtagccattactcttgtaatactataatgtaatgatttctttatcttcctgtttccataataggccataaatctaatagacaaatttaagatttcctatttctccaacccccttccccaccttggattgggtatatctcttctgtacttcctttaaactctgtgtatatctctaaggttatacttcttacattgtatgaaaacactgtctgtacccgcattgtaccatgcattccatgagggcagagaccatatcctgtcatctttcccctgcacctggtacatagatgattaatgtaggcttaaatgaaaaaaataatcatttacctttttggattataccttaagccacttttgattacattcatactttcagattttatrtaaagtttagcaaatacttaatgcacaaagtatattaagtcatgattgttactttttaaaatgtatttatcagttatmctttttcttttattaatcaatactatgatttttttttctttcacttcagtgatggagtgcccagtgatggaaactgrctcactttttacctcaggaattaagagacatttgaaagacaaaagaatttcaaagactactaagttgaatgtttctcttgcttcaaaaataaaaacaaaaatactaagtaagtgccatcagttttaaaatacactcacgttttaacttttccccagaattgttatatatttgctaccttattttatcaagtacagaaaattactaaaatgaccattttgttaactgataactttttaaatttgatccttcctatctccttcaactcctgttagttgggtggttttgatgatttaccctaagtgtgacacagttgaattttcagcagtgaggctgcagtgacccaagacakctactttctacagcgcagaaaaaaactaccaacatgacttttctggaacagatgtagtaagagtagcaggttgttctggcatgttgtggcaactggatgatgggtagccttgaggaggtgggctcacactgggtgcttatatatacgtgtgtatatatataatgtatatgtgtgtgtgtgtgtgtgtgtgtgkatacatgtgactttatataggcaatcttatgaagacactgagcactttggaaatggaatttcatgaattctggagttaaggcatcagaagggcaaaaaaaaaaggaggtgggaaaactccccaagataaattttcattacttctgaaaattatctcagtgttcatacccatcttagcaggagttggggaggtatccttttagtcacattatctgctgatatagctcctgcgaaggacaatcacgtgtgccttctaaaacaacccagcctcctgggtgcctgtaaatcatgatgcagctcccacctaggtctctagggccactccttacactggctcttgcttactccctttggcaagactattccacaccccctgttatgaaggaatatgctgactttgaggagtacaacaggaaaatgttattactctttatcttctggaaatcctaagcttgttgtagtcagtttccatttgctatgccaagaatggctatccaaaactactctctctgtgccaaaggtaaagtactgttttggactctgttttgcagaatcccaagttttccctgagtacttataaaatgttattaaattttataaaacttatttcacatacactagacttttattcagtggcatatgttattgaatagtgaaatgtaagttaaaattatgaaaatataatgatattttaaatgtactaagggaacacactatatttatggtaagctttaccagggaattcacaatgaaatttctttgcttccaacagaaaagcaatttcaggcgtgatttaaatcatatttacatagtgcttttaaagaggagtcgagtttagattgcagtagatgcctagaaataagaggtagaatcttttagatggcagtaaaaggtcccgtggggtttagattatctatctaacattagagaaagtatggctctatcactcaaagtttaaaaatgggcgttgggagtattaagtaatttgttcagttctggagctgtagaagctggctttagaattttcccagattggctaccctcattcctatgggacatttccagttagagctgcagaatcagtttctccattctgtctgctagtcaaaggtaggaaattaggtagagcagcaagtatcaagatttaatttttgtgactgatctaattatgtagaatgctatgtctgtgctgcagtcctcttactccttttttatacatattctgcattcctcacaactcttgaattcttcatcttctgtctagctttcatttcctcacctctaaactctgggtttatttttctcaaaactacatctgtattgttattcccttttctaatcttcagttaaaacttgtgaaatgcattttgtctatgttttactaaggaatataaaaatttcttaaggtataagctgaatattaactcattttaaaaatctttttacagataattcttctattttcaaaatatctttaaagcacaacaacagggcattagctcaggctcttagtagagaaaaagagaattctcgaagaattacaactgaaaagatgctattgcaaaaagaagtagagaaactgaattttgagaacacatttcttcgcctaaagctaaataacttggtatgtaagctatattgtttttgaattctaattataacttaaatcttttagctgcattattatagaagctttaaaaatatttttcaaatctccaatagtgaaaaattattgaaagtcagtataccatgtaagtctatgtcaaagtacaaactgttaatgggtaataaaatatgtgttttaaatctacattctaaatgtgtgcttgtgtgctgtgtaaaccagtataatactttgaccaacattcgattgctaatcataaacaaagcttggtacattaatacatttttaaaagatggtcatagttcttccggtgttcttgaaaggaaaggaattcccagaatgttgttattcttttttaatctcagcatttacctggctacaagctaaacagaatgagaattatagttgtttcttttccttccaaatttcaactctgttcacagacaggacagtgagagccaatgattagctaggctgcaactatagatctaaatctaaaatgagtagaactttttataatggaaaaaggacctactctacttgtgggtttaattccggtggctgacaaactgttctcttgccatgtgatatattactatgagaagatagaaaaatgtttataggaaaacaaaattgttctaaagtattcaacatatgtgtgtgtgtgtgtatacatgtatgtatgtatgatatgtatgactatttggactatataatactatttggtactatataatataccattttagctgaatgtgatctcaatttttagctcaatatgatatcaactattttttaagttttctcacatggatggcattcataaatgcctgatattataataaattacaagtcttaactgattaaaaggggtctttattttacatgtgcagaataagaagcttatagacatagaagctctcatgaacaataacttgataactgcaattgaaatgagcagtctttctgaggtaagtagaatttatatgtaaatagtgttgttctttagattactgaggatcactgagattacttaaataacatcaaggttagagattcacatttcaagttttgtgcaaaggactgatgataatatcagttttaactggctaacagcatattatcattttgtataattggttattgaaaatgtcatatgaaaattaggtttttattaaaagtaacaggattagacaggttagtggaacatactggctcctaaatggactcagaaacataaagacattagtagaaaggaagcattttaagtgaggaaagactttggggtttttgttttttgtttgtttgttttaaagatggacacaattgaaaaactggggaaaaaaatagaggctggtcctactttatactgttttctaaaacaaattctaaatttcccaaatgcttttcatgtggttctttttggagaawtcagagggctgaggtcaacatctagattaaggaaaagtaaaaactggacagcaggtagatggagaagctggaggtgaaggcacagtatacattcttggtagctaccttcttgaacttactatttaacagactaacttttgcataccaagctttaaaattctttttctttctagttgttactaagtggggcaggtgatgggtcatatagacgtactgttctaacatcagaacgagataagaaaagtatagaataaagtttcacacatgcttttgtccgccttcagctactttcttctccgttctgtcttctccttgtacctcatgcaggtgattgctttcatctatttctttatataaaaacaaacaaacaaaataaatattttcttacttttcttctttacacaaaagatagcatgctataccagatgttctatacctttttatgtgacatatcttggggatctctccatatgattatgtggagtgattcctcattctcttttggtgctgctttggatagatccagagtggacttgtaatctacctcactaggctcctgttgttggacacttgggttatcctttgctgttggcttgtgttagtgtagagtgcctttccctcttgcatcattaattttttccctcccttctggattattcccatcaggatgcaaaaatgttatcatctctcatcttaaaaaataaataaataaacctcttayttcacctacttccccgctactatctcagctctcttcttgcctttacagcaaagctttttgagagatttattcactatctctagtttctcttgatcccaagccaattgggttttcaccaccagtccactaaatcctgaaagtcaccattgatgtccatgttgcgaaaacccacggataattcttggttcttctattgacttcacatgacttttagaataccacacactcctaagtctcttcctacctttctggctattccttttcagtctgtttgctggtttctctttattttactaagttttgggaatgccttatgactcagttcttggacttctcttttctatctacattcactcctcctaaataattttattctatcttatggttttaattactgctatacactgttgactttcaaatttgtaactccagcctgaccatctcctctgacctccagacaatttatatctaattacctacttggcatctgtttggatgtctaaaagccatctcaaatttcacatttgccaccaaaccagttctttttgagattttcatctaaggtaatcacaactctcttttcctgtctttttctcacaccccatatctgatcctttggcaaatcattttagttctgccttcaaaatcagtctacaattctaccagttctcacaatcctctttcaccacgcatgtccaaggcactgttatgtcttacttacatattgtattaatattagcatcccaacttggccttcttactttttctcttgttcctctatgtattctcttcttattataacagccagagtgatgctgttaaaatgttagtctctgcttcaaactctccagtggagtcttatctattgcttgatgtgatctgaaaactgaaactcttcttatttcttccacctcatttgctactctcctctttcttccactccttaaccttttcagtgcagttctcttcccactccctcagaggtgagctgctaccatagtgcctttgtacatgttctgtctgcatgtgacaagttcccgtccttcaaatgttgactcaaaagtgactgcagtgaagccttccctagcaactctgcataaatttaaacactcctcacccctgcacttacatttcatatcctgcttttcttctttaatctttctccttaacacttaacactcactgtatgacaattttgtttattgttcatcccatcagaatgtaagctttttgagtgcagggatgtctttaccagaacaacatctagaacatagtaggatgcaataaatacatataaaatattaggtagtgtttccccagtaagactgatgcttgttttatatgtaaataagtaaggtacatatatttcctgcagtccctctttgattgagctttttaaatacaaataatgctaagtaatgtaagtatctttttagtatgatgatgatgtggtctttttaggtggcttagtatgattatttattttagtaactttcctaattttacatttctgtaataaacttcagaagtgatttttcttttaatatgctgctgaattcttttttgccagttttgcttaagatttttctattgttagttataagtgaggactctgaggttttttttctatgcatggaaaaaaacataagaccatacagtctttaggcattgataaaaatgttatatatactaagcccataaaaagaatttggatgttttactttttctatgttctttaaaagtgatacagtattataattgtttttctttaaaggttttgtagaattattctgtgaaaccatctggacctgggacttttctgatgagagtgatagtagctttttgttgactttatttatcctgtggatattggtccccttaggaaaatgtctttctttcttttgtgtttagttttattaaattatttttccttmgaaagttatctgtttcatctaagtttttaaatggatgttcacagagttgaccagagtagtctgtcattattcttttaattttgtctgtgttgcatttccccagttgattaattttatgtatttgggcttttatttgtcttttttctccccactatcttaggttgttgtgatttttctattttattttattcttttaaaagaatcatctttctaatttaatttaatgtttgatgtttcaaacattttttgcttttatttttaataagttcttttgcctttttgtggttcattgttacttttctaactttgagtcaatgctttttttaattgttaactgtaggtaagatgccatttttctctcaatactttcaattttttaaattgtctttagttttgagaattttgactttgatgtgttttgccatgaatttccttgagtttatctttttgaggttcactcagcttcttgaatttgtaggttgatgtctctatcaagtttggaaaaatgttcagccataatgtccccaagtacttttccagtcctgccctctttctctttctcctttcctctaggactctgatgacaggaatgttttatcttttttgctattccacaaattcctaaccctctgttatttttttcagtctcttttctttcttgttcagtttgagtaatttctattgttctatctccaagttcagggatttctttcycccctttttttctcggttttgctgttgagcccatttaatttattttattttatttggttattacatttttcagttctgagctccattcggctctttgtatctatttgtttgctgagatgttccattttttcatttgttttaagcatgttagtaattgcttgttgaagcatttttatgatacttgttttaaaatctttgtcagataattccaacatttgtgtcatctcagtgatgatatctattgtcctttctyattcaaatttagagttacctgatttttggtatgacaagtgattgatttttgattgtatcttggacattttagatgcattataagacattggatcttatttccatcttgtgtttaagcagacctcctttgacactacactggtggtaaggggaggtgctgcctactgccaagtggggactgaagtttagacttcccattcagcctctgttracaacactgtggtgggcataactgatgagtgggtctgagagttcaggctgacaccactatggctggaacagggaagggygcacctcattactttcatggcctctgctgacatgaggatgaggaggataatgaaggggggaggttgttactactgaagagtgatgaaaatcctagttctttattaaaccacttctatccccaccatagaggagagggaggggaactccttcytatcactgaatggggatgtatagcatatagacattttattttctgtgtattatgatgtttttacatcttttaaaacattattggctggagacactgcccttctcagggctagccaatttttagagatagcaagggaccagccaggagcatgtcttttgttttagtctgtttkctgctgctataacagaataccacatacagggtaatttattgttttcttttcttttttcatttgagatttcattctctaaaaagactgggtaatttataaagaacagagattcatttggttcacagttctggaggctgggaagtccaagagcatgatgctgacatctggcatgtgtcatcccatgatagaaggtggaagggcaagaaagcatgcaagacagaaaaggagaccagactcctgtaacccactcctgcaataacagcattaatccattcatgagggcagagccctcatgacctaattacctcttaaaggtcctgcctcttaataccatcacaatggtaattcagtttcaacatgagttttggaggagagattcaaaaccatagcacttttgatatgcaagctaactaatccagagccatatctcccctgtctggcctttatatctcaggaggcaatggtcctctgctttgatcgtcccagggtcaggtactaggcaaccagggacctacctctcctgtgtcttagagcctgccaaaattattcaaactagccaattctagactattcaccctgccctgtcttgcctttcctatggaaactccaataataggctctggcctaaaccttcccctcattcccatcttctgccttctgaccatcctagtgtcttttctgtgtggctctgcatggcctgctgtacctcttgtctctaggacctgcaagtataataaactttatttttttcctgagtctctaccttcttttaatggctacacccaactgactatctcataaaaagaatatgaaacaggatggagatccaaatatgtcctccactgacattgttgggcggggatgtgctctttaacactgggctgtcccaagccttttctgatggtactgctgatttggaagagagttgtcttattatagcctggtgagtgtggaagtttaggttccccattttgacctttgtgcttttgtcaaaaattaattgaccaaatatatgtgaatccatttctggactctctgttctatgtcattgatctatttgtcttatcattatgctaatactgtactgtctcaattactgtaaccctcctaacttttttctttttcaaagttttctttgtttttttagctattctaggtcttctgcatttycatatgaattttaaaatcagcttgataatttggcaccattcccttgtttctattacagcttagctctgtaataaaaaacatggttgtgtgttgcctaattttctggtgtttattaataattaaaacatgtttgtatctgaaaatttagaaatatggataagtaaatatataaaagatatattaaaatcacccagattttgaattttaaaaagccatttaaaagatgtattataaaattcaataaaatattgcataatacatatgtagacatgaacatattgcatgtatgtaaagatattgtatttgtgtaggtatagtcatgtatttattcctacacatagaagaatgttgaggttatataccaaaatgttggcagtgattatctttcgttggcatgattaaggatgcactgtgttttaaccttattatcacattattctcattaaattattaaaggtaaatgcaaaaattgttcttttactattaatgtcattgtataatttggtactgtgataactaacatgatttaataaggttagaaactttgttttctttatttttttcaaaaatagttccatcagagttcctttctactgtcagctagcaagaagaaacgaattagtaaacagtgcaagttgatgcgtcttccatttgcaaggtaaatatgggcttgaattacactagttcagagtatatagattttatataacacaattagtgtttgtgtgtattgtacagtgttcaggatcatcaacctgtagttatctactaacgtagaaatgagctggtttgtagtgtcttgctataggttgtttctctaggactccaaggaaacttacggtcaatcccccaaccaggtttatttgtaatgtcttgctactttatagttcttttttttcttttcatctagttcactcctggccttatattgatttttgctggataaatctgatgactgtttctacctttattatcctgtgtactgtcctaaactttaaaattaatttttgtcgaccagcaggacgtggtggctcatgcctgtaatcccagcactttgggaggctgaggcaggaggatcacgaggtcaggaaatcgagaccatcctggctaacatggtgaaaccccgtctctactaaaaatacaaaaaattagccgggtgtggtggcgggcacctgtagtcctagctacttgggaggctgaggcaggagaatggtgtgaactcgggaggcagagcttgcagtgagccgagattgcgccactgcgctccagcctgggcgacagagcaagactctgtctcaaaaaaacaaacaaacaaaattaacttttgtctttgctcttatcctcctgtgcacaattctcattttttattaatttgattataagttatagaaagcaccctatttcaaatctgtcatcttacaagtcagtcagtgatgctcagagaggcaaaatgattgaatgaattgatagcattgaccaaaatcctgttgtctcttttagaaatgttctttctattatatataacatatagatttaatgcttttacttaagtgcacaagtaaakgcacttatttattgaaatgctatctgtgccatagtaaaaaattctcatatttactgtatcactttcaattcattgtagtttgttccattgacttgcctattatgtgtgttattaccatttcataccagtacattttaattgttgtaattttaaaatagtaaattttgttgtttattagatccttagtagtttttcaaaagtatgttgtcattatgcacgtattgtttcatatagatatgcaaattaagtgtcaacttgtcctccaaaaaattgtattgtgtgtctttaagtgaacttttgtttgaagtatattatacatattcaaacatggtggattttcaccaagtgaacactgttgtgtaatgcatacccagaacaagaaacagaatattaccaacatctcagatacttccttgtgtccctttctagtcactacccactacccaacacctacccaaggataaaatattatactgacttctaattatagatcaattaattttacatggttttgaacttcatataatgaaattatacagtatgtatgtttgtctctgtcttcttttgcccagcattatgtttgttagattcatccatattgctgtatgtagttgtaaattatttgttctcattgctgtatagtattcaattgtatgattatactacaatgtatccattcttcttatggtcaacattttgttggttttccagtttgtttgtttgctttttgagacagagtcttgctctgtcacccaagctggagtgcagtggcacgatcttggctcactgcaacctccacctgccgggttcaagtgatcctcctgcctcagcctcccaagtagttgggattatgggcacccaccactcttcttggctaatttttgtatttttaatagggacaggattttaccatgttggccaggctgatctccaactcctgacctccagtaatcctcccacctcggcctctgaaagtgctgggattacaagcatgagccaccacacctgacttggttttctagttttggtctattacaaatagggctgccacatatatgccttttgatgaaggtatgcacacattctgttaggtatatagtgtggagtagaattacttgggagatctatctatctatctatctatctatctatctatctatctatctatctttggcttcaggagaaactgctaagtagttttctaaaggagttataccaatttacattattactaacaatatatgaggattcctgttgttctgtatcctcaacaattcttgttattgtctgtctttttcattttagccattttgagggatgtatagtggtatcattttgtggttttatttttaattttcctgataattaagaagttaagtatcttttcatatgtttactttctattgggttatctgtcatattttttaaggtgttctttgtatacatatttttgtatgtgaggcaaggtctcactttgtcacccagcctggagtgtagtggtgcaatctcagctcactacagccttgacctcttgggctcaagcgatcctctctcctcagtcccccaagtagctgggactacaggtgcatgccatcatgcccggctaatttttatactttttgtagagacagggttttgccatgttgcccaggctagtcttgaactcctgagctcaagtgatctgcccacctcaacctcgcaaagtgctaggattacaggtgtgagccaccatgcctggcatattcttcgtgtatcttctactctgtggcttgcccctttgctctctgaatggtgtctttagatgaccagtagctctttatgaaatccaactttgtttgtggcggggaggtgtgtatcttctccctcacccgccttttcggttactaatttttgtgtccttttgagaaaatctttattggttctggttctaaaacggcagtgtaagataagctggcttctcttgccccaacaaaacaaaacaaaacaaaacaaaatatacagtgccaagatctaccaccatcaacagcccagagmtcaagctagttgagatacttcctggggccaaaaagaggtggaaaaactctgagcagatggtaggagaactgcacttccacatgtgcaatgcccctccctcccattctgccaggcccgaactatgtggaaaatctcccctcaactcacagtttctatactggaaaaagcaaaattgaaatggtcagccagcttccccaccttcttcagttccctgtcaggagaactgtccttgccttaactgatgggtagcattatgactgcctgaagggagaaatatcccggaggacaggcagagacagacaagcaaggctggactaccatccccagcccagaaactctgctctgtaactcagccaaaggaagcgccaaatgagagtggttgtaggaggtgcattccccaggtcccctgggtgtgaactcctagccagccttcccacattgctgtcctaaaccctttgggacctcccccattttgggacaggcagtggtcaaccatttactagctccaaggtgaacctgggttgaaggcaccacctggagccaaaaagaaggcagcaaactagcagtatagatttgctaaaaaaaaaaaaaaaatacaaaaaattagccaggcgtggtggtgggtgcctgtagtcccagttattcaggaggctgaggcaggagaatgacgtgaacccagaaggcggagcttgcagtgagccgagatcctgccactgcactccagcctgggctatcgagcgagactccatctggaaaaaaaaaaaaaaaaaaaaaaaaaaagatttgctaggcagatatattcaataaaatccaaaacaggctggacaaagaaaactggaataaataatccttcaaggcaaagacatagacttacactcactagaaactacagcagacaaggagccatgagcttcccaaaaggacaaaaagcagaaatttagtgactgatgaagtggcagtttgtgatttcttggaccaagaattctaaatagtagttttaaggaaactcagtgatctccaagataacaaagaaaagcagctcagaaatttatcagagaaatttaacaaagagattaaaataataaaaaaaagtcaaacagaaatcttggaactgagaaatacatttgctgagctataaaactctttagaggttcttaacagcagaatgaaccaagcagaggaaagaatcagtgagctggctatttgaaaatacacagtcagaggagaaaaataaatagaaggaaaaggaatgaagagtgcctacaagatacagaaaattaccccaaaagaccaaatctaagaattattagtgtttaagagagagctgagcatgagcaaggcataggaagcttattcaaagaagtaataacagaaaacttttcaagacatgagaaagatatacatgtccaggtaaaggaaggcctgagaacaccaaacagattcaatgcaaataagacaacttcaaggcatataataatcaaactctcaaaggtcaaagacaaagagaagatcctaaaagcaatgagagataagaagcaaataacayaaaggagctccaattcatggggcaacagacttctccacagaaaccatgcaggccaggagggagtagaacaacattttcaaggcactcaaacaacaccaacracaaaaaactgacacccaagaatattgtgtccaacgaattgtcatgcaaatttaaaggagagctaaagtctttcacggataaacaaaagctgaggaaattcaccaccaccaaggaccatcttgtgagaaatgcagaagggagttcttcaatctgaaagtaaaaaacactaccatgcaaaaggaaactttttaaggtataaaacccactggtaaaattaagtacacagacaaactcagaatcctttgttaactgtatttatggtgtgcaatccactcaaactctagcatgaagcccaaaagataaatttatcaaaactatatcaacctgttaatagataatataaaaatatgtaaattgatacaactaaaagacaaaatgttggagggtggagttaaattatagaattcttttgtgggttttcatataaattgtctcagttcttcagttaaaagccatagagtagctgaatggataaataaatgagacctacctatgtgctcccttcaagaaactcacttcacctgcaaagacacatatagacaaagtggagaagggctggaaaaagatattccatgcaactagaaaacaagagcaagagtagctgtactcgtagcagataagataaactacaaagactgtaaaaactggcagtaaaggagggtcactatatgattaaggggtcarttcaaccagaggatataacaattataaatatctatgcactcaacactgcagctccatataaagccaacattactagatgtaaagggagagagagaytgcaatacagtaatagtagggggctttaacatcccactctcagtaatagacagatcatccagacagaaaatcaacaaagaaacagcataaactgcacactagatacaataggtctaactgacatttcacccagctgctgcagaatacacattcttttcatcaacacatggaagatttttaagaatagaccatatcttaggcacaaacaaatctgtacaagttcaaaaaaatataaatcatatctggtatcttcacaatggaagaaaactggaaattaaaatgagaggaactttggaaaatacacaaacaaatggaaattaaacaacatgctcctaagcaaccaatgggtcaaagaagcaagtaagaaggaaattraaaattttcttaaatgaaaagggaaatacaacatagcaaagtgtatggggtatggcaaaagcaatactgaaagggaagtttatagcaataaatgcgtatatcaaaaaaggagaaaaacttcaaataaacaacctaaaaatacatgtcaaggaattagaaaagcaagaacaaagcaaatcccaagttagcagaagaaataataacgatcagagcagaaataaataaaattgatactaaaaaagtatagaagataaaatgaaaagttggttttttgaaaagataaacaacattgacaaacctttagctagactgagagagaggactataataaataaaatcaaacaagagatgagacataacacctcagacctcagaaatataaataattattagagacgattatgaataattatacaccaacaaatcacaaaatgtggaagaaatgaatacatttttggacacatataacctaccaagattaaaccataaagaaatagaaaacctcaacaaaccaataacaagtaatgagattgaagctataataaaaactctcccattgaagaaaagcccaggctgggcacagtgggtcacacctataatcccagccctttgggaggccaaggcaggagaattgcttgaggccaggagtttgagaccagcctgggcaatataacaagatccagtccctacaaaataaaaaattagctgggtatggtggctaatcctgtgaggattaatcctgtcaggctaatcctgtggtcccagctactcaggaggctaaggtgggaggactgtttgagcctgggaagttgaggctgcagtgagcagtgttcacaccactgcactccagctttggtgatggagcaacaccctgtctcaaaaaaagaaaagcccaggacttgatggattcgctgctgaattctaccaaaaatttaaacaatgattatgaatcccactaaaactctttgaaaaggagggaatacttccaaactcactctacaaggccagcattaccctaataccaaaaccagacaaggacacaacgaaaaaataaaactacagaccaatatcactgatgaacatagatgcaaaaatcctcaacaaagtactagcaagtcaaattcaacaacacattaaaaagaacattcaccatgatcaagtgggattcatgctagggttttaaggatggctcagcagacacaaatcaatcaatgtgattcaccacattaaaagaaacaagaacaaaaactgtatgattatttcaatagatgccaaacagcttttggtaaaattcaacatccctttttgataaaaacacttatcaaaatgggtataaaaagaatatacctcaaagtaggaaaggccatctatgacaaacccacatctagcattgtactttgaagactggaacaagacaagaatgcccactttcactgctattcaacataatacttgaagtactggccagagcaactaagcaagaaaacaaaataaagggcatccacattggaaaggaagaagtcaaattagccttgtttgcagattgcctgatcttataaagactccactgaaaagctgttaggacacataagggaattcagtaaagttgcaggatgcaaaatcaacataattagtagcatttatatacaccaacagtggacaatctgaaaaagaagtcgagaaagcaatcccatttatcatmgctacaaaaaatatgaaatacctaggaatcaatctaaccaaaagaggtgaaagttctatagaaggaaaatgacaaaactctgatgaaagaaataggacaccaaaaaagggaagatattccatgctcatggattggaagaattaatactgttaaaatgaaaatactacccaaagcaatttacagattcaatacaatttgtatcaaaataccaatgacattcttcacagawataagggggaaaaatcctaaaaatttatatgaacccgcaaaagaccctgagtaaccaaagcaatcttgagcaaaatgaacaaagctggaggcatcacactacatgacttcaaaatttatgacaaagctgtagtaaacaaaacagcatggtactggcataaaaatggacatagataccaatggaacagagaacctagatataaatgcaccatttacaaccaactcatcttctgcaaaggtcccaagaacttacaaagggatagtggtcaataaatagtgcgggaaaactggataactatatgcagaagaatgaaactagactcctatctctcaccatacacaaaaatcaaatcaaaatggataaaagatttgaatctaagacccaaaactatgaaactattagaagaaaacattggggaaacacttcaggagtgatctgggcaaaaatgtcttgtgtaagacctcaaaagcacaggcaaccaaagcaaaaatagacaactaagattattacatcaagctaaaaagcttctgcacagcaacggaaacaatcaacaaagtgaagagacaacccatataatgtgagaaaatatttgcaaactgtctctctgagaaaggattaataaccagcatatattgggagcttaaacaactaagtagcaaaaaaaaaaaagaaaaaaggggaatcatatactggtagaaatgtaaattaacatagccactatgcagaacagcatggaggttcttcaaaaaactgaaaatataccttccatatgatctagcaattccattgctgagtatatatccaaaaaaaaaggaaattagtgtatcaaagagctgtctgcactcccatgtttattgcagcactattcacaatagccaacatgtggaatcaacctaagcacccatcaacagatgtgtggataaagtatggaagatatatacacaatggcrtattattcagtcataaaaataaaatcctgttatttgcagcaacatggacagaactgaggccattatgttaagtgaaataaaccaagcaccaaaaggcaaatattctcactcatatgtgggagcttaaaaagtggatctcatgaagatacatttgtggttaccagaggctgggaagggggagagaggaatgaaagagaattttcattatcactgaactgtagacttaaaaatgggaaagatrtaagtcatatatgtatcttttacctcaatacatttttttaaaaggaatatttctattgattgcaaggtcacaaggtgttctgttctaaaatttttattattttcccattcatgtttatatattcagtctacttaagaattttgggtatgatgggagggaagggtcataattttttttttcatgtaggtatcttactgaccttgtatcatttattgaagcaatcatcctttttccaccccactgcagtgtcatctgtattgtaaatcaaggagactggatatgaatgggtctgtttctaaactcactattctattatgtgagtccttttgtcaataccacactgtcttaattattagctttatagtaagtcttgctatttgatagtgtgaatctccattttatttatttttattcttcaacattagcttggctctttgcatttacacttgaattttagaatcagcttgtcagtttacacacacacatacataacctagaatttttggccaggattatgtggaatatagttcagtgcagggacaacggacattttataaaattgactcttccatctataaacatgatatatcactctatttagctataatatatattctctccatgttttgtagtttttttgtattgagttattacatatctcagatttatttctattcatttcatatagatacttttttaaaatatattttttgagatagggtcttgctatgttgtccaggctagattcaaactcctacctcagcctcctgaataactgagattacagttgtgtgtcacagtgctcagctttattttatattcttaaatgatattctgaatgttactgggttttgtttgtttgttttttaagtgaaagcaagtttactagtaaagttaaggaataaagaatggctactccataagcagagcagtggtatgggctgttcaaccaagcttacttgtagttattccttgatcatatgcgaaacaaggggtggattattcatgagttttctaggaaggaggtgggcaattcctggaactgaggttttctccccttttagaccatataaggtaacttcctgacattaccatggcatttgtaaattgtcatggtgctggtgggagtgtcttttagcatgctaataaattataattagcatataatgagcagtgaggtagaccggaggtcacttttgtcaccatcttggttttggtgggttttggccagcttctttactgcaggctgttttatcagcaaggtctttgtgacctgtaccttttgctgacttcctgtctcatccattgactaagaatgccttaacatcctgggagtgcagcccagaaggtctcagccttattttacccatcccctgttcaagacggagttgctctggctcaaacacctctgacacatccgcacccccccgcccccttttacaagggaacccttaatgctaagggttgtagagggacgaaaattcatcttctgtaacttcttcaggctgaataggggtgataatattcctgcctaactgttagggtctcttgtatttgggtagagaggagctcagtcagaaggcaacagtatggtgaggaccattcataactcttgagttctgacaaaaggtgatacctggaagattaataagtgcaccatttcggaaaacattaaggaagcccatactgcattcctacacaaggagtacaatagcaatatattctacaacagtaaaacaaaataagtaaaattatcccaagtaaactaaataagaaggctttccatgaactgggcaattgttgaaaccaagctaatagggagtcactaactgattccaatatgtgcccagaattagaatactgattgagatttctacattacctatccctcttgtttcttttgagcaacagccagagaccactgatgggttcacaggaataagcagagtcagtctaaattgcagaaaaaaactcaaaaacaactgatgagactagaatccaataacaggtgtatcatagtgcttgaaacataattttcttctctctccagtatcacatttttactaaagacawatcataatagaactgatttgtttgcaaaaataagctttagtcttacacttagcctgattatttgtataaagtgcagcaagaataatttttttaaacataagctctttttaaactggctttgatggaacattgttccataaggaatctcagatgagacttttttaaagccgagcccagccatgggtttgtaccctccgatacctataacttgagtaaattcctctcttcttgaggtcccaagataacttggggctcctgggcctgtcagaaaatgacattatttacttaccgcaggtcaagaaacctgtacagggattgtgtacacaaggtatgaggccagttttcccaatgggcctttattggctctctaagtctaatttgattgcttaaaggaaagcacaccattccagtcaatgccttggtaaaataaccagtttttccaattgtgttctgttgcaaaagaaaacagattcttattgtacttatacaaacaactatattgccatcaattaagaayattcacaactagttttcaaattctagagaaatcaggtagagagaaacaaacatgctccaaattttgttcacaggagtatactgtactcaatttttaaaagctgtaaatagctcaaaagaaaaattttgttgacactgaaaaactaaagatcatcarcgtttcaagcaaaaagccaaaaaagattacttcagacttacattggttcagtccatgcagttaaatactgtcctatttgatattcatgaacatttccactctccatgagtactggaagttttttcctctattctaatgtcacaatctccaaagttactagaaacttgcattcaagagcacctgtcaaagtcctatagctgattataaattaccttttgaagaggattaaaacaagacaattgtctgtaggtgacaaaaagtcttagttaggacaaccattattaaagccacaatcgacaaggaaattttggtttcttctatgacacacaacaattttacataacagttataatgattaataacatacactaagccatatcagagttacaggaattttgcataattttggaacacataccagtaatatttatataagcacaaagaaaggcaaacactcacatttgacagtgcttcctgtaagatttttatgccaaatacgccaaatttcaccactgcattagtgcattatttatgtcaaactcaattcttaataaaaccttatacaaaaatgtattcaatcttaatcagtttgaccttaaggtaagattctcaaaccttttacaaccctttataaattttttttaaagagcagatcagtgctctaagaaaaacctgttatgcttttattccaatgttcaatttatggaaagacagaataatacccctttaatatgttctcacacacaacctttttacaagattaatttttcacaaacctccacaacttgctcraatcttcagctttatcctatctaatttaaaacaattcttyaaccctctcaacaaggcaaaaagatattcacattcccatgactttttataatcttttcccaaagattagttaagtcacatgaactaaaaggcattacactttttacttttctgacaaaatgttttatttaagcrcttattatttttaagccagttaaagcccttttatatcacacacaccacacacataaatacacagacaaacaaaagaagatccagtagttgtaagatttttcatttgctagtttttaagtttctatttcaagcatacactttctagggcctaataagcaggcatagctggaaggcaaaataaatccccccaaattaagggtcccatttttataccagatcctagatcccaaaaaatgagaaatgctacggaacaagacagtacaatgattttactgtgcattttttacaaagcaacccaaagctaatcagcccattctgtgattagcccatcccccaggggaatcttatttctcagtggtagtgggaggtaaggacatttccataccttccaggtggccaagagcatgcttttctgatccaaacatgcaaacagccgagtatccccaccataactgccattagctatccccagaagcatatttcctaccaaattattacaccccaatgttctctcataatgcaaagaatttctgatacccctgaaagtcaaaaatatcagataacacaatgtgaaacagaatagagccttagattttgagggagatctatcaactttcaattcctggggtttcatgaggtaaataggtttttcccaaaacagggtctgtggtgcctcctctgttttccccaaggagtctcaggctgttagagcttgaatatccgctttttttgtttgtttgttttgagacggagtctcactcttgtcatccaggctggagtgcaatggtgcaatctcggctcactacaacctccacctcctgggttcaagcaattctcctgcctcagcctcctgagtagctgggattacaggcacctgccaccaagcctggctaatttttgtatttttagtagagatggggtttcatcattgttggccaggctggtctcgaactcctgacctcaggtgatctgcccacctcagcctcccaaagtgctgggattacaggcatgagccaccgtgctaagtcgaatatccgcttttaattatctactgacttttagtcatagtgctcttttaaaaagtccttttaaatctcattacctgattttagccaggccaaacagccaatatttctcgcttttgaattttaccaaaggtaacctcccaggtgaaaccaataagcctaaagttatgacttaaccataagttaatcatatgtacatgatattttcaaggaggtggtaagcaatttttataagatctagaatctccaaaggtagctcagagaaaggaagattcacgaagggaagccagaagtcatacatggaggggaagagaatcaacaaatgataaagatcacacagatatcaaccagaaagtactcattccctaagctgggtattgaacccaagctgccatagtgaaaagacaaagccttcgccagtaagctacagcattgggcagtttccattacccttcccagaaggaccttacagcagccaattttgagcttgcaaaggcttttaactgctcaaaacaatttttagagctaactatgatatcaaccccaaaactcctggccgagagagagagagagacagagacagagacagagagacagagagagggagagagagagagattgcctgtggcaaagtggggcaggcaaagagttcagggaagccagagaaagacccactcattgcaatgacactgaatcaaaagttcaggtggccatttgtcagttgtgaaaggatcttttccagcagtcctgtcagctctcaggtttccccctttaggggaggaaaaagctccccatgtcccatgaacatgtatgtgcctaatcctgtcacccacagccatctgcaaacagtggaaggcaaattaatccaaagagaagagtggttaatgtcccataatgccaaatttgttcgtagccaagagggactttactgatgggggcctctaatcccctacatctcagaagggactctaaccctcataagttgggcctcaaactgaagtttggtgaagcatccttgccttttattaagaggggcctttaatccactctgtcttaggagagactaactcccctaagttgggcctctaacccaatcccatcctttacctgggcaccccaccacttacccaaagttggccaattggtgctgcagtctatttcctttgggtcaggggtctcttcagtatcatcccttcatggtttgccaagaagatgttattggaaagcgtcctgatccagaccccaagagagggttcttggatctcacacaagaaagaattcaaggcaaatccttaaagtaaaagcaagtttattaggaaagtaaaggaataagaaatggctactccataggcagagaagctctgctttttaaatttaattttcttcttgatgttaatatatagcaatatgatttttggatattgaccttgtttccagtgaccttgctattctaatagtttgtgaataaaattttactatttgtgaataagggcagttttattccccctaacctcctaatatatagcttttcttttatttgtttgtttgtttgttttgtccaggttttggcttttattttttcttaccttgttgcattggctactttttttttttttttttgagacagagtctcactctgtcaccaagcttgagtgcaatggcatgatctcggctcactgcaacctctgcctcctgggttcaagcgattctcctgcctcagcctcctgagtagctgggactacaggcatgcaccatcacacccagctaatttttgtacttttagtagagacagggtttcaccatgttggccagggtggtctcgatctcttgaacctcgtgatctgtccaccttcgccttccaaaatgctgggattacaggtgtgagccaccgtgcccggccagctacttgttaaatattgaataaaagaagtaagaacaggcattcatattgtattcccattattaaatattgtattcctgttattaaatatgatgtctgctcttgggtttttgtagattctcttaatcagattatgaaagtttctttgtactttcagtttgctgagagtttttcatgaataactactgaattttatcaaacgctttttctgtcactattgagtagatactaattttttcttttttctattaatgttatgaatttttaaatattttttattcatataatgaattataaggatttttgaatgttaaaccacaattgcatttctacaatgaactgctcctgatgaagtatccttttgatatgccacaaaattgtaattgctaattttaaaaaaatatttttgcatcattttacatcattgtatgttgatgaaaatgatgtataatttttgtttcttgtaatagattttgtcaggtttttgtatttatagtatgcyggtcactgtaaatgaattaagtgcacctctttttctgttttatggcagcatttgtgtaggattttttttttttttttaatgtttagaagttatctgggcctgcttgcagttttcttgtggaaaaggttttggtaacatctcttttttttttttttgaggtggagtttcactcctgcaacccaggctagagtgcagtggtgcgatcttggctcactgcagcctctgccttccgggttcaagtggttctcctgtctcagcctcctgagtaactgggattacagatgctcgccaacgcgcccagctaaattttgtatattttatagagacagggtttcgccatgttggccaggttggtctcgaactcctgacctcaggtgatccacctgcctcggcctcccagtgtgctgggattacaggcatgagccaccatgcctggtgtaacatctcatttctttaataggtataagaatattcagatttcttatttcttcttatgttaggtttgtaaaattttttttaaagaatttgaccatttcatctaaaattactggcataaaattgtccataatattatcaagttatgtgcttaatgtgttttgggtatgtagtgaggttctcttcttctttctcagtattgttatttgtgtttcatcactttttttcttagtcttgctctagaggtctgtcaattttattcatctttgtgaaggtctcatttggagctatgttgttgttttagtatatttgttttctatttcattgattctgctctttattgtttctttctgttttgcttttcttttcattattattattactcttattagttgcttcttggggtagtttagattatcaattttcagcctctcttttaaaaaaataagcatttaaggttattttcctataatcactgctttagctgtgttccacaatttttatttgtttattttgtgatgagttctcgttgcccaagctggacttgatttcctaggttcaaatgatcctcctgctttagcctcctgagtagctgggactacaggcatacatcatcagtcttctagattcacggtttttgatataccatatcattatttagttcaagattttttttcctgattttttatttgaccctgtggatcacttacaagtatattgtttaatttctaagctgatgggtatttttatttttactttttgttgttgatgtctagcttaattctgctataattagggactatagttaaaatgaatttcgatttttgaagtatattgggaatttcattaggacaaagcttgatctaatttggtaattatttggggtgcacatgaaaaaaatgtgtaktttgcaatggttgaacgcagtatttttatgtatggcagctgtgtctagtttgttaattatagtcttccatatccttcctgcttctgttgtctgtttattctgtcagttattgagagaagtttattaaagtctaccattatgattatgaattcatctgtttctccttttagttttgtcaatttttgctatatgtattttaaagctgttattaggtactcatacatttaggactgatttgtttttctgatttctagcaatggttcctgctttgaagtctactttgtttgttataatatttccatgatatatctttttctatacccttactttcaaattctattatatttaaaatgctatataagtgaatcaggtgtcattttatcatcttcaggtatctatctttttctgttgaaaagttagcacctttcttgcaagctgaagaagttcccttttttctggttttctgagtttttataatgatttgtattgaattttgtcaaatgatttttttgcatttctagagagaatcattatttttttctttgttctattaatacagtgacttcagtggattttctaatgcaaactttgcgttcctaaaaaaaaattccacttcgttatgatgtattattctttctatatattgctgggtttgatttgctaatattttctttaaaattcttgtgctatgttcataagggatattggtctttaattttcttacaaaaaccattgatgggttttgacaagggttatgctggcctcatgggatgagaagcatttgtcttcctcaatttttgaaagagtttgtacaattggtagtttttcattaatgtttaatagaattcacaagagaagtaatttgggcctggagtttttaattatgaatttaatttttaaaatagatatggggcttttcaagtttttggtttcttttcaagtcaatatagaaaacgtttgtctttcaagaaaatcacacatctcatctagtcagtaaagtttattggtgtaaagttacttatactatgcttttcttattcttttttttattattatactttaagttctagggtacatgtgcacaacgtgcaggtttgttacatatgtatacatctgccatgttggtgtgctgcacccattaactcgtcatttacattaggtatgtttcctaacgctatccctcccctctgcccccacccmacgacaggccctggtgtgtgatgttccccatcctgtgtccaagtgttctcattgttcaattcccacctatgagtgagaacatgcagtgtttggttttctgtccttgcaatagtttgctgagaatgatggtttccagcttcatccatgtccctacaaaggacatgaactcatccttttttatggctgcatagtattccacggtgtatatgtgcacattttcttaacccagtctatcattgttggacatttgggttgtatacatttgggttggttccaagtctttgctattgtgaatagtgctgcaataaacatacgtgtgcatgtgtctttatagcagcatgatttataatcctttgggtatatacccagtaatgggatggctgggtcaaatggtatttctagttctagatccttgaggaattgccaccctgtcttccacaatggttgaactagtttacagtcccaccaacagtgtaaaagtgttcctatttctccacatcctctccagcacctgttgtttcctgactttttaatgatcgccattctaactggtgtgagatggtatctcattgtggttttgatttgcatttctctgatggccagtgatgatgagcattttttcatgtgtctgttggctgcataaatgtcttcttttgagaagtgtctgttatccttcacccactttttgatggggttgtttgattttttcttgtaaatttgtttaagttctttgtagattctggatattagccctttgtcagatgagtagattgcaaaaattttctcccattttgtaggttgcctgttcactctgatggtagtttcttttgctgtgcagaagccctttagtttaattagatcccacttgtcaattttggcttttgctgcaattgcttttggtgttttagtcatgaagtccttgcccatgcctgtggcctgaatggtattgcctaggttttcttctaggttttttatggttttaggtctaacatgtaagtctttaatccatcttgaattaatttttgtataaggtgtaaggaagggatccagtttcagctttctacatatggctagccagttttcccagcaccatttattaaatagggaatcctttccccatttcttgtttttgtcaggtttgtcaaatatcagatggttgtagatgtgtggtattatttttgagggttctgttctgttccattggtctatatctctgttttggtaccagtaccatgctgttttggttgctgtagccttgtagtattgtttgaagtcaggtagcgtgatgcctccagctttgttcttttggcttaggattgtcttggcaatgcgggctcttttgtgtttccacatgaactttaaagtaggtttttccaattctgtgaaggaagtcattggtagcttgatggggatggcattgaatctataaattaccttgggcagtatggccattttcacaatattgattcttcctacccatgagcatggaatgttcttccatttgtttgtgccctcttttatttcattgagcagtggtttgtagttctccttgaagaggtccttcacatcccttgtaagttggattcctaggtattttattctctttgaagcaattgtgaatcatgagttcactcatgatttggctctctgtttgtctgttattggtgtataggaatgcttgtgatttttgcacattgattttgtatcctgagactttgctgaagttgcttatcagcttaaggagattttgggctgagacgatgaggtttttttaaatatacaatcatgtcatctgcaaacagtgacaatttgacttcctcttttcctaattgaataccctgtatttgtttctcctgcctgattgccctggccagaacttccaacactatgttgaataggagtggtgagagagggcatccctgtcttatgccagttttcaaagggaatgcttccagtttttgcccattcaaaactggaggctgtgggtttgtcataaatgactcttattattttgagatacatcccatcaatacctaatttattgggagtttttagcatgaagggctgttgaattttgttaaaggccttttctgcatctatggagataatcatgtggtttttgtctttggttctgtttatatgctggattacgtttattgatttgcatatgttgaaccagccttgtatcccagggatgaagccaacttgatcatggtggataagcttcttgatgtgctgcaggatttggtttgccagtattttattaaggattcttgcatcgatgttcatcagagttattggtctaaaattttctttttttgttgtgtctctgccaggctttggtatcaggatgatgctggcctcataaaatgagttagggaggattccctctttttctattgattggaagagtttcagaaggaatggtaccaactcctctttgtacctctggtagaattcagctgtgaatccatctggtcctggactttttttggttggtaggctattaattattgcctcaatttcagaacctgttatcggtctattcagggattcaacttcttcctggtttagtcttgggagtgtgtatgtgtccaggaatttatccatttcttctagattttctagtttatttgcatagaggtgtttgtagtattctctgatggtagtttgtatttctgtgggatcggtggtgatatcccctttatcattttttattgcatctatttgattcttctctcttttcttctttattagtcttgctagcggtctatcaattttgttgatcttttcaaaaaaaccagctcctggattaattgattttttgaagggtttctttgtgtctctatctccttcagttctgctctgatcttagttattgcttgccttttgctagcttttgaatgtgtttgctcttgcttctctagttcttttaattgtgatgttagggtgtcaattttagatctttcctgctttctcttgtgggcatttagtgctgtaaatttccctctagacactgctttaaatgtgtcccagagattctggtatgttgtgcctttgttgtcattggtttcatagaacatctttatttctgccttcatttcgttatgtacccagtagtcattcaggaacagattgttcagtttccatgtagttgagcagttttgagtgagtttctcaatcctgagttctagtttgattgcactgtggtctgagagacagtttgttgtgatttctgttcttttacatttgctgaggagtgctttacttccaactgtgtggtcaattttggaataagtgtgatgtggtgctgagaaaaatatataktctgttgatttggagtggagagttctgtagatgtctattaggtctgcttggtgcagagctgaattcaattcctggatatccttgttaattttctgtctcatggatctgtctaatgttgacagtagggtgttaaagtctccctttattattgtgtgggagtctaagtctctttgtaggtctctaaggacttgctttatgaatctgggtgctcctgtattggttgcatatatatttaggatggttagctcttcttkttgaattgatccctttaccattatgtaatggccttctttgtctcttttgatctttgttggtttaaagtctgttttatcagagactaggattgcaacccctgcctttttttgttttccatttgcttggtagatcttcctccatccctttattttgagcctatgtgtgtcgctgcacatgagatgggtctcctgaatacagcacactgatgggtcttgactctttatccaatttgccagtctgtgtcttttaaccggagcatttagcccatttacatttaaggttaatattgttatttgtgaatttgatcctgtcattatgatgtttgctggttattttacttgttagttgatgcagtttcttcctagcatcagtggtctttacaatttggcatgtttttgcagtggctggtaccagttgttcctttcaatgtttagcgcttccttcaggatctcttttagggcagtcctggtggtgacaaaatcgctcagtatttgcttgtctgtaaaggattttatttctccttcacttatgaagcttagtttggctggatatgaaattctgggttgaaaattcttttctttaagaatgttgaatattggcccccactctcttctggcttgtagagtttctgctgagagttctgctgttagtctaatgggcttccctttgtgagtaacccaacctttctctctggctgcccttaacattttttccttcatttcaactttggtgaatctgacaattatgtgtcttggagttgctcttctcaaggagtatctttgtggcattctctgtatttcctaaatttgaatgttggcctgccttgctaggctggggaagttttcctggataatatccggaagagtgttttccaacttggttccattctccccgtcactttcaggtacaccagtcagacgtagatttggtcttttcacatagtcccatatttcttggaggctttattcatttctttatactctttttttctctaaacttctcttcttgcttcatttcattcatttgatcttcaatcactgataccctttcttccagttgatcaaatcagctactgaagcttgtgcatgcatcacatagttctcatgccatggttttcagctccatcaggtcatttaaggtcttctctatgctgtttattctagttagccatttgtctaatctgttttcaagggttttagcttctttgcgatgggtttgaacatcctcctttagctcggagaagtttgttattacagatcgtctaaaaccttcttctctccactcatcaaagtcattctccattcagctttgttccrtggctggcaaggagctgcattccttttgaggggaagaggtgctctaatttttagaattttcagctttctgctctggtttctccccatctttgtggttttatctgcctttggtgtttgacgatggtgacgtacagatggggttttggtgtggatgtcctttctctttgttagttttccttcttacagtcaggactctcagctgcaagtctgttggagtatgctggaggtccactccagaccctgtttgcctgggtatcaccagtggaggctgcagaacagcaaatattgcagaatggcaaatgttgctgtctgatcgttcctctggaagcttcatctcagaggggcactcggccatatgaggtgtcagtcrgtccctactgggaggtgtctcccagttaggctactcaggggtcagggacccacttgaggcgatagtctgtccattctcagatctcaaaccctgggctgggggaacgactattctcttcaaagctgtcagacagggacgtttaagtctgcagaaatttctgctgccttttgttcagctatgccctccgccagaggtggagtctacagaggcagtcaggcctccttgagccgcagggtgctccaccggcttcaagcttcctagccgctttgtttacctactcaagcctcagcaatggcgggcacccgtccccccagcctggctgctgccttgcagttcaacctcagactgctgtgctagcaagagcgaggctccgtgggcgtgggaccctctgagccaggcgccggatataatctcctggtgtgccatttgctaagactgttggaaaagcacagtattagggtgggagtgacccaattttccaggtgctgtgtgtcaaggcttcccttggctaggaaagggaattccctgaccccttgcacttcccaggtgaggcgatgccttgcagtgcttcagttcacactccgtgggctgcacccactgtcctgtaccaactctccaacaagccccactgagatgaacctggtacctcagttggaaatgcagaaatcacccgtcttctgcrtcgttcatgctgggtgctatagactggagctgttcctatttggtcatcttggaacctctcttattcttttaatgcctgtagcatctgtagtgagaacctttctttcctgatttttgtaatttgtatgtttaatcaaactagctagaggtgtgtcagttttattgttcatttaacaaactcagcttttggcttcattgattttatttttctcaattttatgttttatatttcattggtgtctatttttaaattatttcctttcttgtatttacttttaaaaacatagagatatataattcacttaacataaaatttcttatcacatgaaattcacccttttaaagtatacagtgcagtggttttagtatattcacaaagctttgaatcttcaccctgttcatttctaaaatatttcaatctctaaaagggaatctcatatctataagcagtctccattctccacccccctagcccctaacaactgctaatctactttctgtctaaatggatttggccattttggatatttcatatgaatggaatcataaaatatgtggccttttgtgtctggcttttttcacttagcatattgttttcaaggttcattcatgttgtagcacatatgagcatttcattactttttatggagagacaataattctgttgtrtggatataccatgttttgtttatccattcatcaatcaatggacatttgtattgtttccactttttggctattatgaataatgctgcaataaacattcatgtacaaatttttgtgtggacatacattttcagttctcttgaatatatgcctagcagtggaattgctgggtcatctggtaactccgtgtttaacttttggagaaactgccaaattgtttttccaagcttctgcaccattttacattcccgccagcacagtattttgacactgatttctccatctcctcaccaacacttgttaataattatctattcttgtgagtatagccatctaggagtatgaagtagtattgcatcatggtttttatttgtagttccctattaattaatgatgtcaagtatatttttatgtacttattggccatttgcgtatcaagatcattctcttttgattatcttttccatgtgagtttaaatcatgtttttctattgcttcatatattggataatattagattgcacctgggtattgtgtatcccttgttggagaaaatgtagattcagttatgctcacccaaagagttttgatgtttcaattttaataggcactaaccttgtctgaacccaaaataagcaacatctgaaatctcattttagttgttttatccttagatagctgcttcgaatcttcctcatatatatgggattcagaggtcagctagatatttggggagcatttatacacaaaatttggggctctcctctttacctctcttatctgacatttccccccatcacttcacagctgttatagttgccctgaattctaaccttgaaccaataagactgtaggtttccaactttttttgaatgtggcaccagctgaggctgtaaaacaatgggaaactcactcttcttccaagtgttggcacccccttcgctagctctctacttgctttttgtccattcactgacttctagtagttgttttttaaaatattttgtccagaatttatagtcattatgttaggtagggttggtctgatagtaacttttagccattaccagaagcagaacctctccgtttatttttgttaacttgtttcctcaagtggtatagaaatttcctcccaacagctattctactggtagttgcctttaaatttctcataaatatttatcaraaatattttatttttcttattataaattattttaaaatatctgtgatttccttggaatacaagacagctctttactgtttgtggacgatattactcttcattctttgaattcaaatatgtcagtgtatcaaattatttctgtgggtttctgtcagttttcttcccatagatttaattactctaggaataatgattttagtgtacttggatgccttttggaaacatagcaaacttatttcacacataattttataaacaattacatttgctagaaaccaaaggaagatttttgggtattacatagaattaaaattttatgaaaagtataaatattatacatggctgtttgtaagtacatttgaacttttttcatttgcttaatagtagtcttctaatagcacaagaagtaaatatataaattatcttcttttggggccactgtgactaaggggttaagaagcattcatgtttccttccaagttctgttctagtaggaactactcatttcctacctttaagtgtcttcattgaacttgaaaaagtaccaggtggatttgtggttcgatcttaaatagaatatagaaataactgcccatgcatttaaagaaaatttataaaacacataatttctcatttccttcccacttgcctttagggttccattaacttcaaatgatgatgaagatgaagataaagagaaaatgcagtgtgacaacaatattaaatcaaagacattacctgatattccctcttcaggatcaacaacacaacctttatcaactcaggataattcggaagtgttatttcttaaagaaaataatcaaaatgtatatggtttagatgattcagaacatatttcttctatagttgatgtacctcccagaggtgagattgttttaaaaattcattttgagtatttgtattagttacattcatcagatgttcttcctgagggcaattatgtataacagttaataagttagctctcttatgttaccgatttgctaacttctgccatttaaaactgctggtgatagatttaattttaaagtaaatatgctgacaaacatcacacccacagtggcctaatactgttactctggaagaaatatttagaaataaatggacctaatgagcttttctcaatatcttagcttatgatttgaaagataycatatatttacttagttttaccctctttttttgtagatatgaaaattgggggcctagataggtatagagactctttgaagatcatcaccagttaattaatggtaaagcaaaaacttgagtctgggtaatggttgagcaagaaaaaagatggcatttacattttatttacatagtattcctaaatgataatctgtggtgtagtctggtgcttacagatttgccatagattttcagactgggatatggaactataacaattttgaatttagagcttagaattgtttttcctttctgaaaatgtgtgtgtgtgtgtgtgtgtgtgtgtgtgtgtgggcatatgtatatgtatataatatatacacacacacatatatacacacatatatatggtatacatataatgtatacagtatacatatatacatgtgtgtatatatttacacacatacaaacatatattaatatatgtatatataatttatataaattttagctgcctgttgatagtctttgatagcaatccttttcagagctatcactattatttgggttcatttgctggcctcctttcactctagaaatgtatgctaatggttctactgttggctgtactccactctactgttggggctgaggcagaattctcagtatatattttctgtagatacaaatgtaaaatgtgatttaggagtattcatcatttctaacttattttcttataagcatagattcttagtaatattaggatctgatcagaacacattgtcagaaattatatctgtgaaacagcttgatttcgaatctaatttgtttaaggtaacttatttatttcattacttgtttctgagttttgttttccttttcttaatagaaagccattcccactcagaccaaagttctaagacttctctaatgagtgagatgagaaacgcccagtctattggccgcagatgggagaaaccatctcctagtaatgtgactgaaaggaagaagcgtgggtcatcttgggaatcaaataatctttctgcagacactccctgtgcaacagttttagataaacaacacatttcaagtccagaattaaattgcaataatgagataaatggtcatactaatgaaacaaatactgaaatgcaaagaaataaacaggatcttcctggcttatcttctgagtctgccagagaacctaatgcagagtgcatgaatcaaattgaggataatgatgactttcaattgcagaaaactgtgtatgatgctgacatggatttaactgctagtgaagtcagcaaaattgtcacagtctcaacaggcattaaaaagaaaagtaataaaaaaacaaatgaacatggaatgaaaactttcagaaaagtgaaagattccagctctgaaaaaaagagagaaagatcaaagagacagtttaaaaatagttcagatgtcgatattggggaaaagattgaaaacaggacagaaagatctgatgtcctggatggcaaaaggggtgcagaagatcccggttttattttcaataatgaacagctggctcagatgaatgaacagctggctcaggtgaatgaactaaagaaaatgacccttcaaactggctttgaacaaggtgacagagaaaatgtactgtgtaataaaaaggagaaaagaataacaaatgagcaagaggaaacatactctttatcccaaagttcaggtaaatttcaccaggagagtaaatttgataagggtcagaattccctaacttgtaataaaagtaaagcttctagacagacatttgtgattcacaaattagaaaaagataacttactcccaaaccaaaaggataaagtaaccatttatgaaaacctagacgtcacaaatgaatttcacacagccaatctttccaccaaagataatggaaatttatgtgattatgggacccacaatatattggatttgaaaaagtatgtcactgatattcaaccctcagagcaaaatgaatcaaacattaataagcttagaaagaaagtaaaccggaagacagaaataatttctggaatgaaccacatgtatgaggataatgataaagatgtggtgcatggcctaaaaaaaggtaatttttttttcaaaacccaagaggataaagaacctatctctgaaaacatagaagtttccaaagagcttcaaatcccagctctttctactagagataatgaaaatcaatgtgactataggacccagaatgtgttgggtttgcaaaagcagatcaccaatatgtaccccgttcagcaaaatgaatcaaaagttaataagaagcttaggcagaaagtaaatcggaagacagaaataatttctgaagtgaatcatttagataatgacaaaagtatagaatacacagttaaaagtcactcactctttttaacgcaaaaagataaggaaatmatccccggaaacctagaagacccaagtgagtttgaaacacctgctctttctaccaaagatagtggaaacctgtatgattctgagattcaaaatgttttgggggtgaaacatggccatgatatgcaacctgcttgtcaaaatgattcaaaaataggtaagaagcctagactaaatgtatgtcaaaagtcagaaataattcctgaaaccaaccaaatatatgagaatgataacaaaggtgtacatgacctagaaaaagataacttcttctctctaaccccaaaggataaagaaacaatttctgaaaatctacaagtcacaaatgaatttcaaacagttgatcttctcatcaaagataatggaaatttatgtgattatgacacccagaatatattggagttgaaaaagtatgttactgataggaaatctgctgagcaaaatgaatcaaaaataaataagctcaggaataaagtgaattggaagacagaaataatttctgaaatgaaccagatatatgaggataatgataaagatgcacatgtccaagaaagctatacaaaagatcttgattttaaagtaaataaatctaaacaaaaacttgaatgccaagacattatcaataaacactatatggaagtcaacagtaatgaaaaggaaagttgtgatcaaattttagattcctacaaagtagttaaaaaacgtaagaaagaatcatcatgcaaggcaaagaacattttgacaaaagctaagaacaaacttgcttcacagttaacagaatcttcacagacatctatctccttagaatctgatttaaaacatattactagtgaagcagattctgatccaggaaacccagttgaactatgtaagactcagaagcaaagcactaccactttgaataaaaaagatctcccttttgtggaagaaataaaagaaggagagtgtcaggttaaaaaggtaaataaaatgacatctaagtcaaagaaaaggaagacctccatagatccttctccagagagccatgaagtaatggaaagaayacttgacagcgttcagggaaagtctactgtatctgaacaagctgataaggaaaacaatttggagaatgagaaaatggtcaaaaataagccagacttttacacaaaggcatttagatctttgtctgagatacattcacctaacatacaagattcttcctttgacagtgttcgtgaaggtttagtacctttgagcgtttcttctggtaaaaatgtgataataaaagaaaattttgccttggagtgctccccagcctttcaagtaagtgatgatgagcatgagaagatgaacaagatgaaatttaaagtcaaccggagaacccaaaaatcaggaataggtaggttaataaccattatgaaatgataaagttttagaagtgttttgttttttgttttcgttttttacttagccagtgaagtattttctaactggtatttttatggaatttaaaaacaatatataactgagtacatgatccatagaaatagcatgaaggaataaagaaagtttcatactttgggaaataacagtgagagtatcttggacatttacaactataaatggatttggcctttaccacaaacttgtctaataaagaccataggcaaataatttgctttttcatacatctgaaggaaattgaatgttttaaatgtatataataatgaattgtactggtttttattttactgaagacagttgcatgtttcttgagagtgagactctttccccattcaacaacgtatatttaatgtgatcaaacccttctagatattatagaggactgaaaaataaacaataccaaccccctttcctcagattccatgtatgtaacaaacatcatggtgaaatggaataaacgattctttaagcacatgtattatgctaagggatataatggggagtaattttgactagaggaatcttcaaacgcatccttaaataggtagcattttaggccctaaaggataagtaagatttttacctgtagtatttactttttatttttttcccagttattaaaatagtactcattgcaaaaaaatcaaaagtagagagtcagaaaaagggagggggaaaaaatcacctgggagaactttagtccatttaccatgtgcatgcagacccaaatctatggaattttaaatatatatttcttttgccattagaaattttgtaatattaaacattcctataccaattaaaaatttttactgggagcctattatttcaatatatgtgtgtagatccctaaggttttggcgggtaartcaattccaggtaaaagcacactgaagcaaaagaattacaaaggtttagagttgcaggatttgttagaagactggtgagacattttttatctttgtgctcctcatggtgccttacacagagtgagtgatcaatggcatatatgttgaatgaactgtaatttgtgtgcttccatgaaaagagttgaactaggatgaactttgggagccatatgtgatttcagaatgaaaaagttgtaggctactttgacagtttgtttcaaatgttagtctctttcctctcaaaattgaatcaagatttaaaatttgctgtggtgatttgcagaccactatatagctcatatctatttgtatctctatatactttttaaaatatttgtgaaaaataatattctttttcaggtgatagaccattacaggacttgtcaaataccagttttgtttcaaataacactgctgaatctgaaaataagtcagaagatctatcttcagaacggacaagcagaagaagaaggtgtactcctttctattttaaagagccaagcctcagagagtaagtatttcaaatgattttagtatgccattataaaatatatccttaaaaaaatttctgcctgaattagtatttgagcacttctgataattcaataaaatgtatattattgatrtgtarcaaccacagtatgatttgggtaagagttgaagaaatatgtcctttggacaggctatttttggggggttggagaattgtctggatttaaattgatttgcttttggttagttcccagttctactachgtcatattttaaattgtagcctgatacttataatttttaaaatttgtggcctgtgatttgcaagccatttttgttaccccatttgtttatttcctaccttgttccctagaagtcaaagtggtttatgtgtcctttactctcaaagaataacagtcctttctctttatttttgtaaatttcaaacataccccaacaaagagaatagtgccctcctccaatttatccattcctcaggttcaacagttataacactttgtcgaatttgcttcatgtatcctttttgttgtattttagagtctcaaatattgagtcatttaattcttaaaacacttcgatatatctctctctaaaaagtaagaacttaaagttcttagcaaaactagacaacaatgatcacatctaacaaaaaagaatgattctcatgggtattttaaagcaataaccagcagatggcagtaatataaggcagggtaaaagaaaattaaaagtgaaattaaggaccaaggggcctttttttttcttttttcttttttttttaaacagctattgagagatataattcacacaatttaaactgtacaatttagaccagatgtggtggctcacacctgtaatcccagcactgtgggaggctgaggcaggtggattgcatgaggccaggagttcaagaccagcctggccaacatggtgaaaccccatctcyactaaaaatgcaaaaagtagctgggcatggtggcgtgcrcctgtagtcccagctgctcgggaggctgaggcaggagaatcaccttgaactcggaggcagatgttgcagtgagctgagattataccactgcactccaacctgggtgacagagtgaaactgtctcaaaaaagaaaaaaaaagtatgcaatattctggtttttagtatattcatcaatatgtgcaaccattaccagagtcaattttagaacatttctttacttaaaaagaaaccctgtaccctttagttatcactttcytatcctcccaattctaggcaaccactaatcaacttcttgtctctctagatttccctgttctagacatttcatatgaatggaataatagaatatgtggtctttgcaactggcttctttcacccagcatgttttaaagtttctttcatatcatagcatgtatcagtatttcaattcatttttatgactggataatattccattgtgtagatgtaccacattttgttcatccatttgttctttgatggacaattgggttgttttcatcttttggctattatgaatatgctactatgaacattcttttgcaaggttttgtgtgtaaagtattgtttttttttttttcttggatatatccctaggagtggaattgctgagtctgtttaattgtttgaggaactgccaagctgtttccaaaactgctgtaccattttacatgcttaccaacgatgatgatttttaaaaatttctctttatctttaccaacacttgtttttctatgactgattctagccgtcctagtgggtatgaagtgatattgcatggtggttttgatttgcaatcccctgataactaatgatgttgagcgtcttttcatgtgcttactggccatctgtrtatcttcctggagaaatgcctgttgagatcctttgcccatttttcagttgggtcatttgccttttaatgagttgtaagttaaactttattttgaactaattttagacttatggtaaagttgtaaaaataatacaaaggtttcccctatggtcctctcccagcattccttaattttaatgtcttatgtgcccacagtaaaattatcaaaactaaagaattagcattggtacaatactattaccaaactatagactttcactaacatcactttctgtttcagaattctatctggagtcccacattgcatttagttgttgtttctcctaagcatcctccaacctatgacagttttcagtcttttttttttttttctgccttggacacctttgaagactactggtcagtttattttgtagaatatctctcagtttgggttttctgatattttctcatgattgcaatgcagttgtgcttttttggcaaatatttcacagaaattatatgtccttcttgcctcatttcaaggcttcatcatgtcagtgtgtttcattactagtcatgttagccttgattccttggttaaggtggtgtctgttgggttttttaactgtgaagtcacaatcttttcctctattgttaatgaacatgggagggagatactttgagtctatatattccatttctcaaactttcacccactaattttagcatccattggtggatcttgcctgcaacagtactactgtgggtactactagtagtgatttttgatttctccctttccttctacattaattggaattcatctgtaaggaagagttgtcttttctatagatatagatatagatatagatatagatatagatatagatatagatatagatatagatatatatcgtgggtatctcttttgttctatagatgaaagtccaatgccatcaatatttatcttgttgctcaagttattccaactttgaccactaagagttccttcaggttggcttccgtgtccttttgacatgacttcatactatttggagcactttcttactttctgacacacaggatgttccagtatgtcatagtggcttaatcctagtggcttaagtagcaatctggatgcagcttaattaggtgctctgcttagggtctgacaaagctgcactaaaggtgtcgtccaggctggttctcatctggaggctgtgctggggaagaatctgcttccaagtcacacaggttgttggcagaattcatttccttgtggttctggacagagggcttcatcttcttcttgttgactagaggctgtccttagcttcttgccacacggcctcctttacagcatggccacttacttcaaagccagctgtggagaatctctagmgcaagtcctgtagcaggatagagtcttatatarcaaaatgtcatctcggaagtgagacatctcatcacctttgccagtggtctccttgtttattgtagaggatctatagtatgttttaatgtctggtagggctagtatcctctcatggtttttctttttcattgtttccctcactgttcttgaatgtttgttgttacaaatgaatcttaggatggtattgacttgtctggctcggtttcataaccttggcactgttgacctttggggctaggtatttctcttttatgggaggctgtcctgtgtattgtaggatgtttagctgtatccctgacctccatccactagatgtcagtagcaccctcacatttataacaaccaaaaatgtctccatatgttgcaaaatttcaactgggaggcaaaagcatcctgagttgaaaaccactggtctataagtatttagttttctttgttgctattatatatggacatgtaactgatgcccaatgttgttcgtatatatgaaagctgttgaattctgtgtcagtttatatcttgttactttctgaactctgttattctcttatctcactgattgtcttgagttctccaggtatagtatgatatcatctgaaaatagagatagttttacttcattaccctgtttgtatgcctcttactgtttttatattagcattggctaataactcaggtacaatgttaaaatagtagcaggaatagtaggcatgcttgccttgttcctgattttagtagaaatgcttctgttgaagtatttttgtctctccattaaacaagatacttgctgtaggattaagatatgtacataatttactaagaaaatgccccttgatgcctattgagtgtttttatcatgaatgattgttgaattttgtcaaaggcttgttcagcatttatgaagatagtaatatacttcatttacttacatgtattaacatggcatctgttgatgagttttccagtaccgaactaaccttgctttcctggaataaatctcacttgatcatggagtatgtttttcataatgtgatgttgaattgagtttgccaaaatattttgtttagaatttttatatcaacattcataactgatgtgagtctatagttacccacctttgaattgtctttatctggcctaggtatcatattaagggaatcaagaaagtcaccatcttggttcctttaatgaaataatttatatttcattataatttatagtgcattataatttatgtttataattatttgtatgttatatacttatataattttagaacagtgggactctctggtttttgtaagtttgttagcatccccctctgaaaccatctggacctagtactgttttgtgtgggatagttccttaataacgttgactgttttttgtgtgtatgaaaattagtctgtttaagcttttttgctgtaatggggtcaatttttgttatttgtatttccacaggaaattatccatttcatctaagatttcaaatttatttgcataaaagtctgcaaagtatcttttatgaattagacatgtaaattaattttaaatcttttttcccataattattttacctatatcatttattattttttgtgtttgttctttttctctttttcttgatcaaattaggtagtagtttatttattaacttttccaaaaaatcagtactttgatttactaattggatctatttttctgttctctacttcactgayttctgcttcatatttattatttccttctttgtgttttctttgatttactttattattgttgttttcccattaaaatttattgtttttattctttcatttatatagataacagtgttttatggacaggcacagtggctcacacctgtaatcccaatactttgggtggctgaggtgagaggatcacttgagcccaagagtcggagaccagcctgggcaacacagggagacgctcactctacaaaaaatttaaaaatcagccaggcacattggcatgtgcttgtagtcccagctgctactagagaggctgaggtgggaggatagtttgggcctggtaggtcaaggctgcagtgagccatgattgtgccactgcacagagaaagatcctgactcaaaaaattaaaaataaaaataagtaaatagaacacacacaaaaaaawttttttttaaagtgtcttttgcaatcaatttttctctgatcagtgctttcaatgtatcttgattctgatacatagtgttttcaatgtcgtttttaagtttctccttttctttaggagttattaggaggttttaaaaattccaggtagatgaacctttctggttttttgtttttatttgtaaatctagttttattgcattttggtcagaaattatttattgtaatatttctgctttatggaaattgccagtattttctttgtgacctactataggatcagcatttataactgtgctgtgattgcttagatgtatattctccataatcaaggtctaaagtttgatatatatccatgagatttactgtatttattatgttgcttagatcttctgtttcttattttttgtaaataagtgatctgttttgtactaaggttatactaagagttgtatattaaaatctactgtgtcctgtgtttccatgtatctcctgtagtttttgcttcagaagggtggttgctctgctttttgctatgtaaatatcatgattattacttattcattttggattatggcctttattatattaaaaatgtcctcatttgtcatgttcagtgctctggactaaagacttaaagtctttaagatataaagactttaaaaacatatttatgagaccttcctgataactcctaccactcctatcttcaatacctatgatgatcattccataatagcaagcagctttaattaggatgtactttcatgggagctactagaagctgtgatatacctagtgtataccatttccaatccaaaaagaaggaagaaaaaaaagtggcaactggatggtcatcactcggaatttatactgaatgttgtggcttttgcttttaaaaattttaccaactaagctgtatagcaaatcatctgcatgcactgtacatttaaactaaaatagaaccttatttccttacagcattttgctgtgttttatttagaataggtacttcttttgaaaggattaattaaactctatctaattacccaaggcagtggtatcacactggctctgaagaggagtacgaaggagtgaaagagacctttccacctaatcttgtatacctttttaaatttgggaccatgtctatgtatttcatctaaaaaccacatttacacacatgcatgtaaaatataactaaactccataacttgaaacatgatgtattaggtgcaggaatctaccctcttactgaaaaaataaaattattgggtaaaatactaaaaaacataccttgaatgcatttcttaactaatgactattagccaaccaacatttcttttagtaggaaagtaagaaaagctcagatcaaagatcaaatgatagcaggaactcagaggggaactgaccttatcctgaagatatttgtctaactaggtgaacctaaacattgcattcacaaccctatggggctagggacagaagacaaatcctagggtttatccaaaataaatagtctaatagatcttcttccataaagttgatctactttctcagtaaaagagcaaactaaaaataacctccccactagcttgctcagccccaggaaataacttgggtgctgaattaaggaggaaaaaaatctttccttagaattcataaccaaaatacagcctttattgcagattatagctggaattcacaatatttcgaaggcaaaaaaaaagttaagctgaggatttagtataattagtgcatgaactatagtgctctgttgtctattagaagcaaatattttgtagggagttgtccatctcacacctmaacatgttttgcacagccaaagttccaaggaaaatgaagggctacctcatagtaaagaaaaacattacatacacaggggaacaaggtmtcagcagaaacagcaatcagacacagaatataaaatgtttaatgtttcaataaaggagaggcttgaaaatgaatgaagatgttgagtggaaaaagtcacagaaaaacacctacagtacgattccatttatataaagatatctatcaaacagataaaaccaaacaatatactttgtgggagagcaatacacaaacgcttaaaacaaaactgtaaagaaaggagtgataatagaattcaggatagtggtccctttttgggggaggagagggttgtgatcagaaaggggcatattggaggtgtggtaatattttgtttcttaacctgggtgtaggaacatgagcatttactttgtttttaaatggtatattttcacatgttcttgaacatatgctaaatttctaacaaaaaggaactatgtaataaacatgtaatatataaaatctatgttgattaatttttcttaaatatttgaaatgaattatttgaagtactctgatagtgagaactataagatttaagaaaaattagagtatttcaagtatttaacaaagcttatggtttaaggaaacttcttttctactgatatgatgaaacaattttcttctccatgcttcacagcaaaagcattaattttgggttgttattaatcttcctttttttctactttgcagcaagatgagaagatgaagtgaatttatggattctggtttttctgaattttcaaagcataaggaatcaaaacagaaatatagtatcaagaagatgaaatgcttaatgaaaaggttttttttttgtttctttggcctttcatggagtgttgatttgtccattcttaatgtttattaataggtatatgtgcataaaatagctattttgtaacattaaactttttgagtcattttggtcatcatataacttaccttcctgtttatttaagcttctttttacctagtagcctttaaccaaacaataaccttttaaccaaataaaatgtgttaataaatacctttgcattggttatcttgtatactaggctgtcttgttttgctgtctgtttttaacccattcaatatatgtggacatccaaaagggtttaaaagccacctcctgccctggcccgttttctctcccttcattcttctgttttcagaaatacatgttgaatgtcagcttctgtattatttctattatatgtaatctgatgacttagaggaggagattaacctttcaggctcttttgaatttggtttttataatttggttttaaagatcacttactcttccagtaataagtagtaataaatcctgttcatatctgagatcaatacacagtttattgaattcaaatgactactcaaactctattccacctagatggaaaacttttttagacaatatctgaccactaacgcggtgggcccagaaatctgcatcttaatcagatgcttcaggtgagtccgtccgaggattgtcctagtaccacactttgagagactgcagtgggggtacagagtgctggaggggtttagtcaatagctctagtgaaggatggatagttttattcaaagaatcccagttgatgaatgaagaagaaatgctagaattagaaaaattgcaaacccctattaaaactaccgctcaggcaatgctcaacaatggatgtaaaacaattaggtgaaatgttgatggagaaattcattacaaaggaatagccctctgaacccactgatcaatgttagcatcattacgaatgaaacaaccagacaccatatgcttcctgctgtgctgcaatattaattatatggtaccacctatgaagtgttcttgccctctcccccccaaaaaattgaacctgaatttaatcaaagctttagatctaatatttagtgcataggaaataagtagagtagaaaaacaataccagggagaagcaattagccaaattcaaaaaatggttcatttcaatagaacaactgacctggtttctttttcaatgtgttaatagtgttaaaaagtctgttttagatcaaaagagactgatgagaccacatgcaaatacattgcacagctcttgtttgattcaaagaagtcaagtgtaaaagacattttttagacacgtgaaatggtgttgcggctgactaaaaggatgtgtatgtgtgtttttgaagtatttagggctaaaatatgtccaggattggcttttaaatactacaaaaaatggagtatgccaaaacgttgaccattgttaaagctcagtgaagggcaggtagatgccaattgcactcttcacttttatgtgcaaagtttggaaaatttcacaataaaatttttgtgtttacataaatgaaataacatgggaaaatgttctaaggtatggcaagtgaaaagaagcctggaaaataactagtttgtcccacttaagtttttaaaggtgttaaaagtacatgtttcaaaaagtaaggatagactaaaaaagtgaacggtggtaagttctaagttgtgggcttacaggtgttctttatttttatgctttgctgtattttccaagttttttttttaagttttccaagatgttttacatctctgttcttatttaccagataaactttgtggttagttactggataaactgtaaatagtgataaaatttttaagtttatatcaagatagcacttcattttaaaaccagtaattattaggttggtgcaaaattaattgcagttgttgccattggaagtgatggtaaaaaccgcaattacttttgcaccaaccttatatttctaaaagatcaagttgtaaacctatttgttttccctaagatccgctcttgcagagttggaataaatatgattgtttacacttaagagtccaggactacagcaggcctggttggaggggagttactaatgttcccagacttaaatccagctggaacaccacctaaaatatgcagtaacataagaccatcaaaagcaatgtcccaggacttacaatgtttgctaagacgcaagagggtgtgacacagacgctaagcgccactggcgaggagatgaaggggtcgtcttcatcttcgccggatgatttccgcccacatagagggcgccagtgacgcccacacacgtgctggtgtcccgggaagagttcctggcaaagagctcaggaacgttggatcttaatcaaggctttctccgtcggggtggatgggttggactttaggctccagcaagccccgccccactcggcgggtcggtgccgccgggtcccaggtgcccgctacttcccagaacctccgcctcccgctccgggccctcgaaccagcgcggacaccacaatggaccgggcgtccgagctgctcttctacgtgaacggccgcaaggtgagcgcccgcgggcttcctctgcccccagacctgcggccagggccggggcagagaggagcccctgccgttcgtcccatcctttcgtgcccgccgtttaaggcactcaggcacggactggctttctcctgtaacagcggctttgccttcgcattcccacccctgcctccggggcagctaaaggctgcgttttcagggactgtcctggatctttgggcccccaccttccttatgttcccctttcctctccttccaaggctcacaagctgatttccaaccacacgccctccctaaacagtaagataaaaagtattcttgcccatcaggggtcagcactcccagatcttcgttccctcaatcccagccgataacgggaacgtccccagtacactgagagcagcctacagaaatggctgagcctcagctcgcggggtgcgtttggaagcgcagagagcaacttagattcgggacaagaccgtagagacgaacacattcaaaccacccccatcgtttctcagatgaagaaatcgttactttccaaagtcacagctagttcctggcagagctgaacccaagtcaggctctgggggctccaaggtcctcacgggttccactgctgggtgcgggctctgtcgcctcagaagctgggctcgctctgcgcaacccgagggacagttccaggcagtgtccgatgtttgggagaagcaaagccccctgggcatcctttaaaacaccccccttaatgtgagcatcaactctgctcactcttaatgttccagtttcattgacattactctgaaggaggaaactgaggcaggaaggttaaggagctcccttgagagctgtggctcacgcctgtaatctgcactttgggagaccgaggcaggaggattgcttgagcccaggagttcgagtttagcctgggcaacatggcgaaaccttgtctctacaaaaaaaaaaccaaacaaaacaaaacaacaacaacaaaaaaaaaccggtgtggtggtgcgtgcctgcagcccagctactggggagggtgaaggaggattgcttgagtctaggagttcaaggttacagtgagctgtgatcacaccactgcactccagcttggacaaaagagtgagatcctatttcttaaaaacaacaaaaacagagctaacaaccaagcaagagcagtggcacctgatttccctggtgctcgtgttggtgccggttcattcagagccacctgtgaccactgcttctggctaagggcagccacaacacttttcccgacgggcaccagctgcctcccctggaagctaaccagtgtgaagcaccaggccctagttgtgaggcctgttctaagaccctgagcctaatttcatttgtggttttgtattatgtttcttaaagaggatcccccaaattgtacattaggcccctcaaaaactttgtctgcccctgctgcctgggttctacattggataagatgagctagtttttcctgatctgtaagggtcattaggaccccttcacaggactgctgtgagggtgaaatatgacaatggggtgagatgattgacattatgtcatttttttcttcttttgcataatagaatggtatagtaaacacaacactggctttgttgtttagacaaacaagtcttcaattccaattctaattctgattgagaaaacctaacctctcagaggcccagtttctctgttaaaaggggatcataccacttacttcataaagagtgatcatgagcattcaatccacttatttgttaagggcctaccgtatgccagtcagtgttccaggcttatgagatacagcagagcacagaaataacaagtccttgcgtgcatggagcttacattgtgctggggagatagcaagcatataaatacgtggaaatgtgtaatgtcaggaagtgagaagtgctaatataaaaaataaagcacagcgtggggacagagagtatgcaggatacttagaggggatggatgttttggcctgtctgaaagggtggcatttgagcagtgactgggatgcagtgaggagcaagccatgcaaacatctggggagacagcatccaggcagtgggaatggcaggtgcaaaggtcctgaggtaggaggatttctgtgtgcttaaggaggtaggttggtgggcctggcaacatgggcagtggcctgattactagggctttataggtgatggtaagggtttgggttaaatgaagaaacagggattgtgagtctaacatctcctcgcttctccttcccccacttccaaacaaatattggtatttttaacataatggccaacaagtttgtgctctattgatttttaaaattagataagctagttcttatctacggactcactttgtctatgggccaaatgtcctgtggttatttgtaaagtataatctggagatattgattctgtttttgcaattacccattagaagaaattgtgttaatctttccctttccttctcctcccttctaaattctgttaggtgtgtgcttcggtacttaataaacaagcctgattacttacatggaaagaactagaataagctttttttttttttttttttgagatcgagtctcactctgttgcctcctgagtagctgggactatgaaactgcaagcacccaccaccacgctaatttttgtatttttagtagagatggggtttcactatgttggccaagctggtctcaaactcctgaccccaggtgatctccctgactcggcctcccaaagtgctgggattacaggcttgagccactgtgcccagcctagcataaactttttcgttccagagagtaagggattgttgagaagagtgtgagagaaaatccaccctagaagagggcttttgaagtcaaacacaatctctggaattaaaaactcacctttgaaaaagaagcttagaagtgaagccacttaggagaaaataggtgacatgattggcttctattctgctttttgctaaattttctcaggtcaccaaaagttgtcctcaggcagaaggtaacgacatctggaggcaaggacagcgcacgttggccagggacctagttgcagagagatttctgaaatcttattcactctaccaaggcccccagaagaacagatgacccatttaacatggagtttaagggaggaagagcccatgaataaattctgccatagatgccacataacaacctcaactcaggaaatgaagcatgtcatttcatgaggcaatgaggtgtggaaatcaaaggtatgggccttagaactagtcagggatgggtttgaatcctgtgctatctgctctgccacttggcgggtctggggcctcgggcaaggtacttaatgtcgctgagcttctgttttctcttttgcaaaatggagctaataacagaaccttttcccttgaaattggggctgattaagttgcatagagagaggttagcagggtgggtgtacacagtaaacagattgtaaattgatatgtggaaacaattgttgctatctggactataaaataatctgtttcattagcagagccagaacctgcttagaggtgtcaaggatgctaagaagcagtcatcctgcattatttgcacaatgagcatagacttttggtactggtgta

SEQ ID NO: 97425 - DNA, 120807 bp, Homo sapiens
  misc_feature (1)...(120807): n = A,T,C or G
caaagtgctgggattacaggcatgagctaccgagcgtggcctattacaccttgtaaccattttgcaactttatctcctggcctgatccaggcctacgtctccttcctggtccctttcctgggtcctccctgggctcctggacccagtcctgccctctccaatccatattccacacagcagccagacagagttctccacagtaatatttaagtgcctctctgctcagttgcctcccgcaagcctgaaatgccctgtgataaaacccatgctcctcatgccagccttccaggcccctcgggatctggcttctcctctccaggctctgctgaagcctctgccctcttcacccacagcacattttttttttttttttctgagacggagtctcgctctgttgcccagtctggagtgcagtggtgcagtctcggctcactgcaacctccgtctcatgggttcaagcgattctcctgcctcagcctcctgagtagctgtgattacaggcgcctgccaccatgcctggctaatttttttgtatttttagtagagatggggtttcacgatgttagccaggctggtctcgaactcctgactgtgtgatccacctgcctcagccccccaaagtgttgggattacaggcatgagccactgcacccggccccaactgctcttctttcagttcctcaaatgcatggtgctgcttcctgcctcctggactttgcacgtgctgtgccctctgcctggaacaccctttaccctctttacccggtccccccagtaacttgtacttcctctgtcacagccctctttatgctgacctgcagcaaaccaagcaccctgtgggtccagggactgtgtcatgttttctgccatctccctgaacctttgtaaacacaaaagcacaggcattactgccccagggaccttgatccaaactccagctctgccacttaccagctgaggaacctcatgcaacctcttccgtgattggacctcagcttcctcatctctgaagtgaggatcacagcaccagcctccccgtgctatgtgaccacctttcataggggaatgacacaagatctgtgctgccctcacacatgggggagcagcaggggcttgcatgggccaatatgggcattctttttttttttttttttgagatgaagtctcactctcttgcccaggctggagtgcagtggcgcaatctcagctcactgcaacctccgcctcccaggttcaagcgattctcccacctcagcctccagagtagctgggattataggtgtgcaccacaacacccggcgaattttttgtatttttagtagagatggggtttcacggtgttagccagggtggtctcgatctcctgaccttgtgatccgcccaccttggcctcccaaagtgctgggattacaggcgtgagccatggtgcctggcctctttttaagctttttgaaaatctcagccattggccgggcgtggtggctcacgcctgtaatcccagcactttgggaggctgaggcgggcggatcatgaggtcaggagatggagaccatcctggttaacatggtgaaaccccatctttactaaaaatacaaaaaaaattagctgggcatggtggcaggcgcctgtagtcccagctacttgggaggctgaagcaggagaatggctgaactcgggaggcggagcttgcagtgagctaagattgtgccactgcactccagcctgggcggcagagtgagactcttgtctcaaaaaaaaaaaaaaaaaaaaaaaaaatcagccatcaatacaaaaaatttcattgcctaacctggtgtacacaaacgcatacatatataattaaaatgagtttcacaaaactaatacttaacatgtgatacattttgatactatgtcatcatttgttaccctatattgttgatacacgttgtgaccatatgtttcagatctcattgtaactcacagtttgagaagcatcaggttgcaacaaccctgcaaggtaggtatcattatcctgtccacattgatggggaaactgaggcaattttaggcaaccgggccaggatcacacagctagtaggtagagaaggttgaatttttacctaagtaagtctgatccagagactgcaaaattcaatgctagtctaagtacttcctatataagatctcatttaattatcccaagagccctagggcaagtactaccagttttgtcatgatcttacacatatctaggtacacagatgacaaggcatttggtcacaaaggctgtaagccgcagagctggtgacttgaatgtgggcaggctggcaccagagttcatgcctgttaagactcttggccctacagaaccattgtgaactccagttaatccaagccccttctccctccctccctccctccctccctccttccctcccttctttccttccctccctccctccctccatccctccctccttttcttccttccttctttcctttcatcttgctgtgtcacccaggctggagtgcagtggtgcagtgatgcaatcttagctcactgcaacctcccaggttcaagcgattcttgtgcctcagcctcccaagtacctggaattacaggcacgtaccactgtgcccagctaatttttttttttttgagacagagtttcactcttgtcgcccaggctggaatgcagtggcgtaatctcggctcaccacaacctctgcctcccggattcaagctattctcctgcctcagtctgccgagtaactgcgattacaggcaccagccaccatgcccggctaatttttcgtatttttagtagagacggggtttcactatattggccaggctggtctcgaactcctgacctcgtgatccacctgcctcagcctcccaaagtgctgagattacaggcgtgagccaccgcacccagcctctttttctttctttttatgtatttttttaaattttagagacagggtctcaccctgtcacccaggctggagtgcagtggtgcaaacacagctcactgtagccttgaactcctgagctcaagcaatcctcccacctgagccttctgagtagctgggactacaggcatgcatcaccacgcccagctaatttattttttttttgtatttttgtagagatggggtcttgctacgttgcccaggctagtctcaaactcctggcctcaagccatcctcccgccttggcctcccaaagtgctgggattataggcatgatccaccgtgcctggccagcccttccctttgctgagggggacagcaaagctgagagctgggaagagatttttcagagccacagctctgaagctccctaggctccagttcttaaccctctgagtgcagtcccagctatgaccagcagggtgggcgagtggaattcggtggaattagtggatttccaggtgactcagcgcctctcaacttctctctcttacttccttctccattactcccgaataaatgcttatcagcaaactggtttttactgagaggcccacagctccccattctccacaagtcaagatcctcacgtggtctccctggggaaggggagagttatggacctagagaagaactttcagagtccctccaagggagacagcagagtggggtcctgttggcctccacccttttggggcacgcagatagtcaatatcttcagcgtccccaaggcctgcaagggtggggccccatatctggaagtcccaggcccagctgggagttggtcaagtctgggctgtgggggcagggagtgctgggggatggttatccccttttctgccctctctcctggggcaactccaaattttcagccctcattgactttcccaggactgctgtccccaagtcttcactcatgtctctctgtgactccttcccattaggtactcgcagcaacctgaccccccaactttttcagtttccagcctggggacttgtggtggttaagagcatgagctgagttcaaatcccagtcctgtcagttaacagctgtgtgatattgggcaagtcactctctgggtctcagttttctcatctgtcaagtagggtgatactagttcccaccccattttgaaagctctcatgtgaagagacgacagagcaagcttggcttagtaaatcctctctgggagtgcgaacaaccaccaccacaaccacaataatgacaaccgcattgcataagagccctggacttacacacgactgtgccagtggagtcctcccggggctcccggggccaattcctctctggcttggactcacataaacttggatctcacatctttccccatttctgcccccgtggccacttgctttggcccctgagtcctcatacacctggctggggcgctcatggccccaatcagcctcggcccgaccccatggtgccccttcctaaagttctgcccgtctgtcccgtgacatgccccgcccgccccggctcatgcctgcttgcaccgcctgcgccagggtggtgagcccggtctggccagtggcgccgaagatcgcgatcttcttgacggccatcgtacgggatcgtgggggtgcaaggcctcagagtctcggcacgcgcgggaacccactggctgctgggcggtgctctctgccctactcaagccaggaacaacggggcggagctggctcgaagggccacgcctcagactctccgcccgcggctcaggtcaaggggcggggcctaacgcggatgggcggggcaggcgtcagcttgcattcgctcaccgtccagcaccgccctctctgcgcgccacttagactggaaggcggggccacagaaggccacgcctccacatagcaacaaatagagtggacggagccgagataacttgtcactcagcgccctgcctccgcgctccacctcccggagaggggcggggccaggcgagcctcacccacggcctctcgtagctcacgccccctctcccggagcctggagcggatctggggcgcactctaagccccagggcctcccagaaccagcaaggggagaaagttaggaggacagagtgtgtgtgtgcacttggatgtaagacactgtgtcacggcgtacctatgcacttatatgaccctgtgtgactcagtgacccggagggcaagcaggactgtgggtgacaccttgtgtcatcctctgagtgtgatcccgtgttacagtgtgactacacgtgcgtgacaccacgtgtggcaggcattgattctgttcttttgtgaccttgtggtgacaccgtgggtgacactgcgtcagcctgtacgatagggtgtgggacgtgtgaggtgtgctacatggaagcgtgagactaattagactgtgacagtgtgtgacaccacatgtctcgtgtaaggatgtgtgacaccgggaccccattcgagtgtgtggctgtgggtgtctgtgttgagctgctcattgtgaccccctgtgactatgatgtgtgaggtgcggcggtgcagcatgtgcggggcgactgctatgaaggttcgagtgtgtagagtgtgtgacactgtggctgtgaagctgtgcgtgatgtgtgggcctatgacactgtttgtgactgccggggagtgtgcggctgtgtgtgacaggtgcatttgtgtgtgacgccgcgtgggcggtggttaccctattggatttgtgtggtggtgggtgacaccgttccagtgtggacgccgcgtgtgacggcgtgagggtgtgaccccgtgagaccccacaggagggagtgacggcgcgcaagcgcgtggatgcgggggtgagtttgtgcgccgaggcccccgcgagtatggcagcgtggcgagcgtgaccccgtgggagtgtgcagcgcgtgacgccgccgtgccctcgcgagtgcagccgtgcaccccacgccgcggccgggtgtgactgcgcgtgggcctcgggcggcggggcgcggggaccgcgggcgggagggggtcccgggggcgcgctgagcgcggcggcggcgcgagagagggaggcgcggcggcgcatgcggatctggctgagccgcgggccggcggggccgagctgagccgggctgggccgggccgggccgggccgggcagcggacgccgacagggagggcggtcggtcgcggcgagcagcggagacagcgacgctggcggccgcgggcccaggtgagctgctatgggggccgacagcccctcccccaagtatgtccccacctggcgagcatccctcctccgcgcgcacggggcatggctggagccccgggtctccccggctggagggaggcaaagggtcgagggcaggacgagcccacaacccccccacccggtctagcttccgcgccacgcgtgggtcttacccccaggccttgtccttcccaggccccctccttgggcgcagtgtctggaccgcagggagagaggcgcggcctgggaagggttaaagcctctgatgccaccgcagcccagcgccccaccagcctttgcggggggggggggtgttggggggaggctcgcaggacaccccttcccggcttccctattacctgctcccttccttcccattcaatcgcgttatggccagagctgatcctcggcctggccagagggctaacaggagtgctaagggcctccccatctctaagtgtcttccactgaagaaaacagctgtaaccaccgtttaacagggagggaaactgaggcacagaaaggccaagttaaagatactcggttaaagatacagcaagaataaagcggaacttgaactcatttctgtctgactccagaagaggcaaatcgatttgctgagatgtgtgaggaaaagatgaagaataatagcaaggaacatgtatcaagggcttgcagtgtaccagataccatgatccctgcattaataacttacctcttcaaacaccgctaagaaacgggtacgattatcattacttttttttttttttgagacggagtttcactcttgtcacccaagttggagtgtaatggcgcgatctyggctcactgcaacctctgcctcccgacttcaagcagttctcctgcctcagcctcccaagtagctgggattacgggcatgagctaccatgcctggctaattttgaatttttagtagacatggggtttcactatgttggtaaggctggtctccaactcttgacctcaggtgacccacccacctccttggcctctcaaagtgctgggattataggcgtgagccaccgcctggcctacccttttgtgtgtgtgtgacagagtttcattctgtcattcaggctggagtgcagtgagtcaatctcagctcactgcaacctccatcccccaggttcaagcgattctcctgcctcagcctcccaagtaactgggactacagacacgtgccaccacgcctggctaatttttgtattttttttagtaaagaccgggttttgccatgttggccaggccggtctcgaattcctggcctcaagtgatccacctaccttgacctcccaaagtgctgagattataagcatgagccaccgtgccgggccatcattactattttgcagatgaacaaactaaggcccaaagagtggaagtatttcagccaaggtcacacaggtggtaggtagctgtgtgctcactttcacttttccatggaaggagggaagaacaaaaatggatttgggactgggcacagtggctcacatgtgtaaccccagcactttgggaagttgaagtgggcaaatagcttgagcccagatgtttgagaccagcctgagcaacatagtgagaccccctctctacaaaaaatacaaaaattacctggtcatggtggagcttgcctctagtcccatctactcaggaggctgaggtgggaggatcgcgtgagcacaagagttggaggctacagggagctatgattgtgtcactgcactctagcctgggtgatagagcaataccttgtctcagaaaaaaaaaaaagatttcaatgtgtccccctaagggacaatttccactctactcactctactgaccaagacttagaccctgccttcctagaattcagtgggttggcaattgtctgggtcttttgaggacattgatctcccaacttcctcctttgttagtcttttttttttcctttttcttttgagaaggagtcttactctgtcgcccaggctagagtttagtggcacaatctcggctcactacaaccttcgcctcccggtttcaagcaattctcctgcctcagcctcctgagtagctgggattacaggcacctgcaaccttgcccacctaatttttgtgtttttagtagagatggggtttcaccatgttggccaggctggtcttgaactcctgacctcgtgatccacccgcctcagactcccaaagtgctaggattacaggtgtgagccaccacgcccagccgttagtcttagaatcaggcctgggggcccagaaggtaaaggagatacatctaatgtcacttaaccctttaaatttcttctctttttttttgttttttttgagatggagtctcactctctcacccaggctagagtgcagtggtgcgatctcggctcactgcgacctccgcctcctgggttcaagcaattctcctgtctcagcctcctgagtagctgggattacaggcatgtaccaccatacccggctagtttttatatttttagtagaggcggggtttcaccatgttggccaggctggtctggaactcctgacctcaggtgattcacccaccttggcctcccaaagtgctgggattacaggtgtgagccactgtgcccggccaatttcttctttttttaaataattttttgttttctatttttttattttcatttaatttaattttattttttctgagatggggtctcactctgtcgcccaggctggagtgcagtggcacgatctcagctcactgcaacctctgtctcccaggttcaagcgattctactgtctcagtctcctgagtagctgggattataggtgcacaatgccatgcctggctaatttcttgtattttagtagagatggagtttcaccaagttgcccagactggtctcgaacccctgagctcaggcaatccacccgccttggcctccctaagtgccaggataacaggcatgagccaccgtgcccggcctatttttatttttttatttttgtttgagatggtgtctcgccctgttgcccaagccggagtgcagtggtgccatcttggctcactgcaacctctgccttcccaggttcaagcgattctcctgcctcagcctcctgagtagctgggattgcaggcatgcactaccatgcccagctcatttttgtatttttagtagagatggggtttcaccatgttggccgggctggtcttgaactcctgacctcaagcgatccgcctgccttggcctcccaaagtgctgggattacaggtatgagccactgtgcctgccccctccactttaaatttttcttcttcttcttcttctttttttcttgagaatgagtcttactctgtcgcccaggatagagtgcagtggcacaatctcagctcattgcaacctgcgcctcctgggttcaaacgattctcctccctcagcctcctgagtagctgagattacagtagcccgaaaccacacccagctaatttttgtattttcagtagagaccgggtttcaccatgttggccaggctggtctcgaactcctcacctcgtgatccgcctgcctcggcctcccaaagtgctgggattacaggcaggacccactgtgcccagccccattaatgcaaatattctatcaccttttttttttttgagacggagtcttgctctgtctcccaggctggagtgcattggcatgatctcggctcactgcagcctccacctcccaggttcaagtgattctcctgcctcagcctcctgaatacctgggattacaagtgtgtgacaccacgcccagctaatttttgtatttttagagacagggtttcaccatgttggccaggccggtcttgaactcctgacctcaggtgatctacccatctcagccccaaaaagtgctgggattacatgcatgagccaccgcgcctggccctatcatctatgtttgaatcctagatactaactggctgtgtaaccttggaaaaatagatcaactcctctgtgcctcagtttcctcctctgtaaaataggtgtaataatagccaactgttagggaattaaatttgtggaaataataagagaaggtacatgaagtactgaccacagtgcaagtgttcaatatgttcattattgttattactgcattacagaactctattgttctaataataacagtgacaatttgctgagcccttaatatgtgccaggggctaagccatgtgttttatcacatcctgtgaagtggtgagggtgaacattattattattattatttagaaatagggtatcgccatattgcccagtttggagtgcagtgtcactattatagatcactgtagccttggcttcttgggctcaagccatcttcctgcctcagcctcctaaatagctgggactacgggtggcaaccaccacatttggctaatttttaaatttttttaaaagacagtttctggctctgctgcccaggctggagtgcagtggcgctatcttggctcactgcaacctccacttcacaggctcaagccatcctcacacctcagcctcctgagtagctgggattacaggcacgttgccaccacatccagctatttttttttttttttttttttttgagacagagtttcgcttttgttgcccaggctggagtgcaatggcatgatcttggctcaccacaacctccgcctcccgggttcaagcgcttctcctgcctcagcctcccgagtagctgggattacaggcatactccacctcgcctggagaattttgtatttttattagagacagcgttctccatgttggtcaggctgatctcgaactcccaacctcaggtgatccgcccgcctctgcctcccaaagtgctgggattataggtgtgagccaccgtgcctggccaatttttgtatttttttgtagagacagggtttcaccatgttgcccaggcttgtctcgaactcctgggctcaagcaatccgccctcctcagcctctcaaagtgttgggattataggcctgagccactgcgcctggcttatttttatttttatagagatgaaatcttgctatgttgcccaggctggtctccaacccctgggctcaagcgattctcctgcctctgcctcccaaagtgctgggattacaggcatgagccactgtgcctaggccttatcattgttattatgtccactttaaagacagagaaattgaggacaagagaggggacaggactcaaarccagtcactgttagaaatgagacttgatcctagacctaacctacctctccctatgtccaggcctcaccttccccgatggcgcaggtaccaggggaagtggacaacatggagggcctgcctgctcctaacaacaaccctgctgcccgctgggagagtccggatcggggctgggagcgggagcagccggctgcgtccaccgcagcggcctcgctctttgagtgctcccggatcaaggccttggcaggtacctggaggagggctggggtgggatgaggaggagggggaagggggaagggtgcccgagaaccttggtggctgggagggtgggaaaagagaccagcactgtccaatagaactttccatgatggtggaaatagtctatatccataatgtaccatataataatcactagtctctgtgacttttgaatgctagaaatgtggccagtgctatgtgacagcctttgagttttaaattttatttagttttaattaaatttatttatatatatattttttgagacagagtcttattctgttgccccggctggggtgtagtggtgagatcttgggtcactgcaatctccacctcaccggctcaagccatcctcctacctcagcyccctgactagctgggactacaggtgcccgccaccacacccggctaattctttttgtatttttagtagacaccgggtttcactgtgtttgccaggctggttttgaacttctgaycttaagtgatccacttgctttggcttcccaaagtgctgggattacaggcatgagccactgcacctggcctggtgttttttttttttttttttttgagacggagtttcgctcttgttgcccaggctggagtgcagtagcgcgatctcggctcaccgcaacctccacctcccaggttcaagcgattctcctgcctcagcctccctagtagctgggattacaggcatgtgccaccacgcccagctaattttgtatttttactagagacggggtttctccatgttggtcaggctggtctcgaactcccaacctcaggtgatccacatgtctcggcctcccaaagtgctgagattacaggcatgagccacggcacccggcctgttttaattaaatttaaatagccacatgtggcttgtgactgctgtataggtcagcacagccttagagccttagaaatgtacagtcccagaatggtgggactctgtaagcatattcccttagaatcccraaatgcagagccatcagatccttggaacttgaaatgtctaagagattcttagacctcttgaaatgaagacctctggcctggcgcggtggctcacgcctgtaatcccagcactttgggaggcaaaggtggacagatctcttgagtgcaggagttcgagaccatgttcgccaacatagtgaaaccctgtctctactaaaaataaaaataaaaaaaaaaattagccaggcgtggtggcatgcatctgtagttccagctatttgggaggctgaggtgggaggatggcctgagactgtgaggtggagattgcagtgagtcaagatcgcgccactgcactccagccccagcagtaaagcaagaacctatctcaaaaaaaaaaaaaaaaaaaaaaaaaaaagagctttggaaatgtgaaacgttatcatcacagacctaagaaattttagtcatkgttccctaggatcataggcccttagaaactgaaactgtaatacacaggaacctttgggacttgataatactaaacctttggagtttccaattagaaatgtggatcttgagaaatctgacatagagtgaccaaaaccttcctgcttttaccaccgaaactctcagccttgggccaaccagtacagtgggtcaccctaccattttttttttttttttgagtcagggtctcactcttcacccaggctggagtgcagtggtgtgatcatggctcactgcagccttgaactcctggactcaagtgatcctcccacctcagcctcctgaatagctggaactacaggcatgcgccaccatgcctggctaattaaaaataatttttttttttggcsaagcatggtggcggatgcctgtaatcccagcactttgggaggctgaggcrgatggatcacttgagatcaggagtttgagaccagcctgaccaatatggtgacactactaaaaatacaaaaattagatgggtgtggtggtgggcacctgtaatctcagctacccaggaggctgaggcaggagaatcacttgaacccgggagatgggggtttcagtgagctgagatcacaccatttcaatccatcctaagtgacaagagcttaactccgtctcaaaacaaaacaaaaaaatttttttgtaagatggggtcttgctatgttgcccaggstggtgtggaactcctgggctaaaataaccctcccacctcggcctccgaaagtgctttgattacaggggtaagccagagtgcctagtagtcaccctactttgatgtatcagaacaatattagcaaagaccagagaactttatagttatagaaagaccttagacctttagaactgtagacccttgaaccttagtacttagtattcatagaggtctggaaccttagaagtgtttaatcatcagcattaaaactggcaaagaccctgaggagcctcagagatatggaacgtcataatcataagcctttaaaacatgacaccctagcacctttgacccttgggaccttracatcttagaaacacggagcgctagaatcataaaatatagatgatcataatcatgaattcttaaaacccaaaggtcagaatcagttccctccaaatcttagaactttagtaactcagcagtttataatcacaagatggatctctgatactaagatttttggaactttatttatttatttatttatttgaggtggagtctcactctgttgcccaggctggagtgcagtggcgcaatgtcagctcactgcaacctccacctcccaggttcatgagattctcccgcctcgggagtcccgagtagctgggactacaggcccgcaccaccatgcctggctaatttttgtatttttaattgaggcggggtttcaccatgatggccaggctggtcttgaactcctgggctcgggcaatctgcccaccttggcctcccaaaatgctaggattacaggcatgagccatggcgctggctcaagaaacctggctgatctagaaacctgtagtcccagcactttgagaggccgaggcgggcggatcgcttgagcccaggagttcgagaccagcctggccaacatggtgaaaccccgtctctactaaaaatataaacattagccaggtgtggtggcgcatgcctgtagttccagctagtcaacaggctgaggtgggagaatctyctgagcccgggaagcagaggttgcagtgagccgagattgtgccactgcactccagcctgggcaacaggttgagaccctgtctcaaaacaataagaaacctggttaggcgcggtagctcacgcctataatcccagcgctttgggaggccaaggtggggggatcactggaggttgggtgtttgagaccagcctggccagcacggcaaaaccctgtctctattaaaaatacaaaaattagctgggtgtggtggcgcgtgcctctaatcccagctactcaggaggatgaggcaggagaatcgcctgaacctcagaggcggaggttgcagtgagcctagatcgtgccattgtactccagcctgggcgtcaatagcaaaactctgtctcaaaaaaaaaaaaaaaagagagagagagagagaaatctgtatatgccacaaagtatgaaccagattcaactggtggattgccagctttgtctgatctagaaacctagactgatgaaaacatacrctcatggaaacttacagtcatacttttagagccttagaaccttaaaaaggtaggaacatatcaacttagaattctagaatttactaatttagtgtaagtgagtttgtttttagttttgtttgtttgtttttgtttttgagaaggagtcttgctctgtcgcccaggctggagggcagtgacactatctcggctcactgcaagctccgcctcctgggttcatgccattctcctgcctcagcctcccgagtagctaggactacaggcgcctgccaccatgccccgctaattttttgtatttttagcagagatggggtttcactgtgttagccaggatggttttgatctcctgaccgcgtgatctgcccgccttggcctcccaaagtgctggaattacaggcatgagccaccgcgcccgtcctgtttttagtttttgtttgttttttgaggaggagggggtctctccatgttgcctagacaggtctcaaactcccggtgtcaactcatccttctgagtagctgggattacagatgtgtaccaccactcccagctgtagaatttattattattattattattattatcattatcattattattatttggactgctgccaggctggagtgtggtgataaaaatcatagctcactacaacctccarctcctgggcttgagcaatcctcccaccgtagcctcccaagtagctgagactacaggcatgcaccatcatgcccagctaattttcttattattttatttttttatagagacagggtctcgcaatattttccaggctgaacttgaactcctggactcaagtgatcctcccaccttggcctcccaaagtgttgggattacaggtgtgaaccactggaatttattttatctagaaaatattaattcagtgcctgctgtgtgcctggctcatgctggacaacatgaggggcatagtggtgactgaggcagcctgggtcctgcccccacaggactcataggtcagtgagagagagagatccggttagacaatgatgacccagaggggtcagagacagggtaggggaggcacaggcagagaggttggggctgttgacagaaaggcacaagcatcaggctgtgatggggaagcccaaggactgtgggagcccataggatgtacttgatccagcctggagaatcaaggagggcttcttggagaaggagaggcctaacttcaggcctaaaggatgaattggcatgaacactggagtgaagagtggaagagtattctaggtagagggaactgcatatgcaaggcctccagaagctgggagtggcttgactgagaaggatacaggtgaggagtaaatgatgatgggagaggagccagtggaagccagatcctttttttttgagacggagtttcgctcttgttgtccaggctggagtgcaatgccgcagtctcggctcactgcaacctccgcctcctgggttcaagcgattctcctgcctcagcctcctgagtagctgggattacaggcgcctgtcaccttgcctggctaatttttgtatttttagtagagatgggggtttcaccatgttggccaggctggtctcgaactcctgacatcaggtgacccacctgcctcagcttcccaaagtgctgggattacaagcataagccactgagcctggcagaagccagctcttaaagggccttgcggggtaccagggagctatggaaagattttaagcagaggtgggaagattttaagcagaggtgggatatggtaagatgagaattaaggactctccaaatcttagaaccatgcttctgagagcatcttgcccagggaaatgtagaaatcccctttaagataaaaaaaaaaaatcctctccagtttgggcaacaaagcaagatcctgtatgcacaaaactttaaaaattaactggccacagtggcatgtgcctatattactctggaggctgaggcaggaggatcgcttgagcccaggaattgaaggcagtgatctatgatggcaccactgcattccaaccttccagcttgggcaacagagtgagatcccaccttaagaaattttattttattttattttttttgagacagagtctcgctctgtcacccaggctggagtgcaatggcacgatcttggcttactacaacctctgcctcctgggttcaagctgttctccttcctctgcctcccgagtagttggtattacaggcgcccgtcaccacgcccagctaatattttgtatttttagtagagatggggtttcaccatgttggccaggctggtcttcaactcctgacctcaagtggtccacctgcctcagcctctcaaagtgctgggattacaggcgtgagccacgcccggcctgtatgactttcataaatgctcacaaatgcacaactctgcttaaatctcccatgcttagggttcacatatagctctacaagtaaaacacatttatagaggaactccagaccccaaaccagtaacattcagcttaatagtaacttcatgatgctgctctcctgctgaaaccaccttgccactcaaagtgcaaatatgacgtagaccactacgctgcatttcttttgcatccctttgcccagctctctcatggtttttctcccgcttttattttgaggcagagtctcactctgtcacccaggctggagtgcagtggtgctatcacggctcactgcagcctcgacctcccaggttgcctgtaatcctagcactgaggctgagatgggagcatcacttgagcccaggagtttgagaccgacctggacaacatagtgagaccctgtctctatcaatgttttcaacattaaggaaaattgtttggaccccacgttcagtgtgttctcctactcaccctccacagtttgtggctcactactgtcattgatctgtgtgacgcctctctccaattctcttttattcccaaatctcaaatcaatttcttctcccctgtaggcaaccactgacattgttttgttttgttttttaaataaagatggggtcttgctatgttgcctaggctggtcttgaactcctgggcccaagcaattctcccacctcgacctcccaaagtgttgggaagccactgcttctgaccccattcagatagtttttaatgtgaatctttttctttgcatgagaataattttgcaaaatgtgcattgctaatgagtaagcawtatatatatatatatatatatatatatttaactttttattattaaagtagttcatgacacagaatggcagataaatcatgccaatatttccacaaatgagtactctcttgtaaccagcacccatattaaaaaacagaatatacaatggggtgtggtgactcatgcctgtaatccgagtgcgttgggaaactgaggcatgatgatcacttgaggccaggagttcaagaccagtctgggcaacatagagagaccccgtctctacaaaaaaaaaaaattaaaaattagctgggtggggccaggcgtggtggctcacgcctgtaatcccagcactttgggaggcagaggcggatggatcacgaggtcaggagattgagaccatcctggctaacacagtgaaaccctgtctttactaaaaatacagaaaattagctgggcgtggtggtgggcacttgtagtcccagctgcacgtgaggctgaggcaggagaatggtgtgaacctgggaggcggagcttgcaatgagcggagatcaagccactgcactccagccggggttaacagagagagactccgtctcaaaaaaaaaaaaaaaaaaattagctgggtgtggtggcatgagcctgtagtcctagctactcaaaagactgaggtgggaagattgcttgagcccgagttccaggctgcagtgacctaagaaggtgccactgccctccaacctgggsaacagaatgagataccatctctaaaaaacaaacaaacagaatgtgacatatgacagctccagaaaagcatcctcatgccacctccctatcactacagtccaagggtgtactctcttaacttctaacagctcagcttcattttgctggtgttttaactttctgtaaatggaataatgcattgtgtgttgttttatgtccggcattattcactcaacattatgcttgtgggagattcatccatgtctccctgtgcttgtgggktggtccttctccttgctgtatagtgttgcgtggtgtgaatgtaccacagtgtgtttgtgcattcacctgttgataagcatttgggttgctgctagtttggggctactataaatggtggtgttgggccaggtgtggtggctcatgcctgtaatcccagcactttgggaggccaaggcaggcggattacttgagtccaggagttcaagaccagcctgggcaatacagtgagaccccatttctactaaaaatacaaaaaagtttgctgggtgtggtggtgcatgcctgtaatcccagctactcaggacgctgaggcaggagaatcacttgaacccaggaggtggaggttgcggtgagccaagatagtgccactggactctagcctgggtaacagagtgagactctgtcttaaataaataaatacataaaataaatggtggtgttctcaagtttctagtacacatatttggtggacatatgcgcttgtttctggtggtttacacccacgcaggagtgaagctgtccaatcatagagtaagggtatatattttattttacatatatatgtatctgttgttgttaattgagacaaggtcccgctatgttgctcaggctggtctccaactcctaggctcaagcagtcctcctgccttggctgcccaaagtgtttggattacatgtgtgagccatgcgcccggccaagtgagtgcatatctaactttagtagagactgcccgtttgtatcgttttatattcccactagcagtgtaccagagattcagttrctgtgcaccccacccttgcgatggtcaggttttttgttttgttttgttttgtttgagacagagtcccactctgtcgcccaggctggagtgcagtggcgcgatctctgctcactgcaacccccgcctcctgagttcaagcaattctcctgtgtcagcctctcaagtagctgggattacaggcgcacaccaccacgctcagctaatttttgtatgtttagtagagacggggtttcgccatgttggccaggctggtctcgaactcctgacctcaggtgatctgcctgcctcagcctcccaaagtgctgggattacaggcgtgagccaccatgcccagctgatggtcagtctttttaattttagccattttggtggctgtgcattctgttgtggttttactttgcattttcctgatgactaagaacaacgaagaaggtgaagcacattttcatacatttattggccattcaaatatcctttagtgagatggccattcaagtcttttttttttttcttttgagatggaatcttgctctgttgcccaggctggagtgcaatggcacgatctcagctcactgcaacctccgcctcccaagttcaagcaattctcctgcctcagccttctgagcagctgggaatacaggtgcccgccaccacacctggctaattcttatatttttagtagagatggggtttcaccatgttggccaggctggtctcgaactcctgacctcaggtgatcgacccacctctgcctcccaaagtgctctgattacaggcgtgagccaccatgcctggcctgatttttaattttttatacaatggggtctggctatgttgccaaggctggtgtggaactcctggcctcaagcaatcctcctgcctcggcctcccaaagtgctgggataatgggcatgagccaccatgcctggcctgatttttctattcctgattacagtcttgttagcatggagcaagagttgagaactgaaatgcccaccaagaccagacgggctgcatacactgagagaactgggacctcctgtaagagggcagcggccacatagctcccgcgatggcagcctggcaggaatggaggtccagggttgccgtatcatgtgatatttcatgagaagcccaaaatctaaattttttaaagacaaagtcttcctattttaaaatgttggcaactgatttacatttttataaaacgcagtcggggtgcaaccaaatatatctcagaggctgggcgcagtggctcatgcctgtaatcccagcactttgggaggctgaggcgggcggatcacctgaggttgggagttcgagaccaacctgaccaacatggagaaaccctgtctctacaaaatatacaaaattagccgggcctcgtggcgcatgcctgtaatcccagctactcgggaggctgaggcaggagaattgcttgaacctggggggtggaggttgcaatgagccaagattacaccactgcactccagcctgggagacagagggagactccatttcaaaaaaataataataaataataaaataaataaataaaatatatatgtatacacacacacacatagacacacacacccctacctctctcaagtatgagttcccaaaatcgatgatcccccagaatccactgaagaaagccaaatctagtccaaatccctctttttgcgaatgtgaaaactggggtcccgagaggggagatgacctcgagaagtcacctggccagttattagtacagacagggcagaacccagttgtcctcattctggtaccactctagggatgcactaaaattccactttggctttagtactagccaaaacctgctatttggcatgggcatcatctgttagaaggcagaggaataaatcctcaatttaaaataattaaaagagtataattggattgtctgcaacacaaaagtatctatcccttaaatatatataactgctatgtacccactaaaattaaaaatacaattttttaaaaaaaatattgcttcttactctagcagtagaaaatatacatttacttatctgtattttttaactttaaattgcaccttgaatgtttacctctagtttgaaaacaaatatgcaaatattaacagtaaatgcaaaggaaatatcttgtttgtgtcagtgtgggttttgtgctgtttagataagatgggaccctatgtgaatactgatcatcaatcatacctgagaaagtgatggcagaaaagatgctaaattgaggatttattcctctgccttctaacagatgatgcccatgccaaatagcaggttttggctagtactaaagccaaagtggaattttagtgcatccctagagtggtaccagaatgaggacaactgggttctgccctgtctgtactaataactggccaggtgacttctcgaggtcatctcccctctcgggaccccggttttcacatttgcaaaaagagggatttggactagatttggctttcttcagtggattctgggggatcatcgcaaagctcttcgcaaagctgaggtggaacgatggcttgagcctgggaggcagaggttgcagtgagccatgatcttacatcaccgcactccagcctggattttatacagggcagaccctgtatcaaaaaaaaagagagaaaaacaagtacaattaaattattattgaatataatcaccctgttgtactgatatcaaatactagatcttactcattctttccatattttgtacccattaaccatcaccccttcccttaaccccactattgataatgttacaaaaggtaaattttatgaaaaaggaaattattgagagatttcaaatggttgaaggagaaataaactggaaatatacatctttattcctgaattaatggaaaacttaataggaaacttaatattatttagtaatgggattttaacagtaactgtacaggctaagctgccaacaaatcgacttcacagtacagtggcttaatggagaagctatttctccctcccagataacctcgagatgatcaacacagttggcaggaagacttagctcagagaggtcagtgtacattccaggttaatttcatcttgtattctgtagacattgaccttggttttccagtttatgggagtcaggggaagaaagaggaaggccaggcagcaattttctttttcttttttaaactttatttttggccaggcgaggtggctcacgcctgtaatcctagcactttgggaggccaaggggggtggatcacgaggtcaggagatggagaccatcctggctaacatggtgaaaccccatctctactaaaaaaaaattaaaaaaaattagccgggcgtggtggcaggtacctgtagtcccagctactgaggaggctgaggcagaagaatggcgtgaacccgggaggcaaagcttgcagtgagctgagatcgcgccactgcactccagcctgggcgatagagtgagactccgtctcaaaaaaaaaacaaaacaaaaaccaaaaaacaaaaaacaaaaaaaccactttattggcacccaccaccatgcccgctaatttttgtttttctggtagaggtggggtttcaccatgttggccaggctggtcccaaactcctgtcgtcaggtgatccacctgcctcagcctcccaaagtgctgggattacaggcgtgagccaccgtgcctggcctaaactttattatttatttattttggaggcagagtctcgctttgtagcccaagctggagtgcagtggcacgatctcggctcactgcaacctccacctccctggttcaagcgattgtcatccctcagcctcctgagtagctgagattacagatgtgcgccactaagtcctgctagttttttgtatttttagaagagacagtgttcgagaggctggtctcgaactcctgagctcaggcaatccacctaccttggcctcccaaagtgccagaattacaggtgtgagccaccatgcccagcctttttaaaactttagattatgaaataattacacattcataggaagtcgcaaagatagtagagatgataaaaagacatgtaactggctggttgtggtagctcgagcctgtaatctcagcactttgggaagcgtacgtgggaggattgcttgagcacagaaggttgagaccagcctgggcaacatcgtgagacccttgtctctacaaaaataaaaattaaaaaatcagatgggcatggtggcatgtgcctgtaaccccagatactcaggaggtgggaggactgcataagcctgagaggttgaggctgcagtgagccatgattgtggcactgcactcaagcctaggcggcagagtgagattgtgactcaaaaaaaaaagagtaatcctactaaaaaatgtccaagggattttaatgacgtttctccaaagatatacaactgtctgatggagcatgaaaagatgctcaacatcattagccattagggaagtgcaaaagaaaaccacagtgaggtacaacttcacgcccactaggatggccataaaaaaaaaaaaaaacagtagagggaaatgaccaagcgcagtggctaacacctgtaatcccagcactttgggaggcctatgtgggtggattccttgagcccaggagtttgagaccagcctgggcaacatagtgagacccctgtctccacaccaaatacaaaaattagccaggcctggtggcatgctcctttggtcccagctacttgggaggctgcgatgggaggatcacctgaggctgggaggcagaggttgcaatgagccaagattgcaccattgcattccagcctgggcaacgtagtgagacccccgtctcaagggaaaaaaaaggaggggttgggaaacagcaagtgttggcaaggatttggagtcctcacacattgctggtgcagcaacttttttttttttttttgagacagggtctggctctgtcacccttgctggagtgcagtggcatgagcacaggtcactgcagcctcaacctcccaaggtcaagcgatcctcctgcctcagccactcaaggagatgggactacaggggcattccaccctgcctggctaattttttgtatttttttgtagagacagagtcttcaccatgttccccaggcaggtctcaaactcctgtactccagcaatccacccgccttggcttcccaaagtgctgggattacaggcatgagccaccatgcctggcctatggtgcagctactttggaaaacagtttgacagttccttaaggccgggcgcaatggctcatgcctgtaatcccagcactttgggaggctgaggccatggctgtatttatccgtgtcctctctgaactgagctctgtgagggccctgctgtattcacagagccttgaacaggcacagagtgtgcattcgaatatttattgaatgaatgaatgactagagccaactggggtcacaagcagggaaggcttcctgtgcaagtgacatgtcaggaaaacttcaagggacaggaaggttttcaccaggtgggtggcagagggtcggggaaggcgtcacaggtaggaggagacatgactgctgaggctggactctcttttttttttttgagaaggagtcttgccttgttgcccaggctgcagtgcagtggcgtgatctcggctcactgcaacctccgctccctggttcaagcaattctcctgcctcagtctcccgagtagctgggattaacaggcatgcaccaccatgcccggttaagtttctttttgtatttttagtagagacaggatttcaccatattggccaggctggtcttgaactcctgactttgtgatctgcccgtctcagccttccaaagtgctgggattataggcatgagccaccgcgcccagccgactcactctttttttttttttttgagatggagtcttgctctgtcgcccaggccggagtgcagtgatgcgatcttggctcactgcaggctccacctcccaggttcaagcaattctcctgcctcagcctctccagtagctgggattatgggcgcccgccaccatgtccggctgctttttgtatttttagtagagacggggtttcaccatgttggccaggctggtctcgaactcctacctcaggtgatccgcctgtgaggctggactcttgcagagagctgggtctgagcaggcttggctcgcggagggctggggtgaaggtggaagcgcctgggggctcatcagggcctctcctccagatgagcgggaagccgtgcagaagaaaaccttcaccaagtgggtgaactcgcacctcgcccgcgtgggctgccacatcggggacctctatgtggacctccgggacggcttcgtgctcacgcggctcctggaagtgctgtctggggagcagctggtgagggggcctgaagggctggggcaggggtcctccctggggtctcaggctgggggttgggcttctctggaagggctgaactgcaagcaggggcctggctcatgggcgagtggaacgtgctggaagggccctgtgggtaagaggtccctctactcgggtgtgtggggctgtggcgctggggcggagcttggtcgtgagaagcctgggcgcgtggctggaaccgaagctgatggctcgctagctacggttgcgaggcggggcttcggtggaaggggccgggctctgttgcaaggggcagggctattagagaagggaggagctttgttagaagggactggcccgggttatgagctagtaggggcatgctataaaacaggggcagaactgtattgcgggttgggggtgggtagtggatgaaggtgcggggctctaggctagggggcagtgttcgttggtagggtgacacctaggtcgtcggtgtctagggacgcagacggtgtcctgggatgtggcttgttgtataaattggggctgtgtctctgggcttgaatggggtttcatctaaaagcgtgggattctcatggggtagagattcgttaaaggactggagcctggatctcaaggaattgtgaggggcatggctatggaataggaacaaacagctgggcgctgtggctcatgcctgtaatctcagcactttggggagccaaggtgggaggaacacttgagctcaggagtttcagaacagcccgggcaacataatgagacccccgtctctacggtttgtttgtttgtttgtttatttgtttaaattaaccaggcgtggtggcgcaggcctgtagtcccaagtacccaggaggttgaggagagaggatcgcttgagcctgggaggtcgaggctgcagtgagccatgattgcaccactgctctgcagcctgggcgacaaagcgagactctgtttctctctcttttttcttaatttttttattcttttaaatagatacgaggcgtcactatgttgcccaggctgatctagaactcctggactcaagcgatcctccagcctcggcctcccaaagtgctgggattacaggcgtgagccactgcaccgggcagagaccctgtctcaaaaataaataaataacccaagcgctgtggtgagacccgtttctacaaaaaatttttaaaaaatcaaaaagcattagctgggtgtggtggcgggcacctgtagtcccagctgctcaggaggctgaggcaggagaatcgcttgaacccaggaggcagaggctgcagtgagtcaagatcgcgcgactgcactccagcctgggcgacagagtgagactccgtttcaaaaacaacaacaaaagccaaaaaaaaaaaaaaagaaagaaaaaaaagaatagataggaaccaacgctgttggaaggaattgagccataaacaaggggaagagcactggggcagggcggagcttgattgggatgggcgtggttctagctagggacccgaaagggaagcagcgaggggtgtgacgcggagtttttgtttgtttgtttgaaacgaagtctcgctccctcacccaggctggagtgcagtggcgcgatctcggctcaacagcagcctccgcttcccgggttcaaaggattctcctgcctcatcctcccgagtacctaggattgcgggagcgcgctaccaagcccggctaatttttgtatttttagttagaggcagtgtttcgccatgttggtcaggctggtctcgaactcctcgcctcaagtgaaccacccgcctcggcctcccaaagtgctgggattacaggattgagccactacgccggggcggccatgggattagtggcaaaacattggtagagagggatccaatggcagggccagggctgagactatgggctaggagggcggggcttcatgatgggggcgtggttatcaggttcgaagtggggcgcccgtggaaggggcagagccagggacgtgaataaaccttgaagggatgtgattctttaaagggtctggctatgggaagagacagagcttctttagaaggattgagtcctgtgtcttggataaaacgagaggaggacagcctgatcctggacactcagggggcgtggccacgggaggcgggcttctttggaagctgcggggccgagggcgccatactcctgtctgtccagacccccgatcgcccaccgcccctgtcgccctagcccaggcccacgcgcggccgcatgcggatccactcactggagaacgtggacaaggcgctgcagtttctgaaggagcagcgcgtgcacctggagaacgtgggttcgcatgacatcgtggatgggaatcaccggctgacgctggggctggtctggaccatcatcctgcgcttccaggtgaccctcgagtggcccctgccaagccccgcaacatgggacttaggaaagcgttccccaccatttacccattcattctttccttccaataatatcctaatatgctggaatcctattccaggtgttagggatgaaaataatgataaaaataattgtcacgatcaccaccatcacgataatcattttgtatcgaccctgttccaaacactgttctaagcacttgacatttaatacacacagcaaccccataaattaggtactatttagtaccccattttaccagtgaggaaatggaagcccagataggtggtgtcatctgcccaagatcacatatasctgggtgttggagctgaaattcgaatccaggcaatcttgatccagtatagagacaaatagacaaaggtgtgccttttaggagcttacattgtggtgaggaagacagataataaatacataaatatgtaaagaagacatgtatggaaaaaggaccagttctagttagagaagtttaaaaagctatgcagggccaggtgaagtggcctgtaaacccagcactttgcgaggctgagatgggaggaacactaaggccaggagtttgagaccagcctggccaacataatgagaccttaaataaatttaaaaaattagccaggcatggtggtgcatgcctgtggtcccagctactcaggaggctgaggcaggaggatcacttgagcccagcagtgtgaggctgccgtgagctatgatcatgccactgcactccagcctagacaacagtgagaccatgacttaaaagaaaaaaaaagctacccagaaaaatacagattatgataaaacaagtaatagggatataaaatgtcagttggtggtgttgagattttagatatggtggtcagaagagggctgtctgggaagttgatggctgaatgacatacaaagatgaagagagaatgcattccaggcagggggcacagcagatgcaaagtccctgagatagaaatgagcttggcctgttggaaatacaggaggaagagcagagtggctagagaatgggaggcaacgggagacatggaggagctgaggctcaggggatggaaggggctaggtgatctgtgatgagtagtttggattttattctgtctgagatggggagaggttgcaacattttatcaaggggaggtgcatacaagtttagaaagatagatccctttggctgggcatggcggctcatgcccataatcccagcactttgggaggctgaggcaagaggattacctgagtttargagttcgagcccagcttggccaacatggtgaaaccccgtctctactaaaaatacagaaattaactgggcttcatggtgcacgcctgtaatcccagcgactcaggaggctgaggcaggagaatgtgagccgagaccacaccactgcactccagcctgggtaatagatagagactctgtctcaaaaaaaaaaaaaaaaaaaaaaaaagtgaccgggcttggtggctcatgcctgtaatcccagcactctgagaggctgaggtgggtggatcacctgaggtcaggagttcgagacaagcctgacaaacatggagaaaccctatctctactaaaaataccaaattagctgggcctggtggcacatgcctgtaatcccagctactagggaggccaaggcaggagaatcgcttgaacctgggaggtggaggttgcggtgagctgagatcacaccattgcactccagcctgggcaacaagagtgaaactccatctaaaaaaaacaaaaacaaaacaaaaaaaaaaacaaagaaagatccctctgggttggaggtgttcaccaacattgggagctgagagcccagggaggaggatagagttggaccagggtgggactatggggaagcaacaaggggcaggtggggaagacactcagggagtggagtggacaggccttacgggaggggagagggagagggtgtccaggggaagactcagagctctggcctggggactagaggatgatggggctgccctgagacagggacagggagaaggagcaggtttgaggaacaccctgaggccagtttgagatgggtccagtggttatgggtccaggacattggagttggggatgttccaggtagatggaacagccagtgctaaaggaccaaggagggaggatgcttgtgattcaggaaaaaggccagcaggtatggagtggagtgagctgttgaagatgaggtcatcaacttactgatgggagatcatgggaacttttacttttaccttgaatgaaacagagatacggagggtgttgaaaagaggagcaaggatctgatttgagtgttcgcagggtccctctctctgccatgtggagaacacactgtggatgcaggagtggggagatcagcatgaaggccaccgcactagcctaggcaggagacggcagtgccttagaccaggaaagtggcccagatgctcagtttggaggctttcttggaaacagagaccgaagtcctaactgatcccctaattgtggatgtcctggccctcaggaattatcctcacactcctggacccccacccccagccagaagctgcctcccccatctcctctgtcacctgccaccttctctggtagcagatggtgagtggggggcattcgaagcctcaagctctccaggccctggtagccattttttgtatcttcacagattcaagtcatcaaaattgagactgaggacaacagagagacacgctcagccaaggatgctctgctcttgtggtgtcagatgaagacagctgggtaagcacccccaccaccttccttaggaggttaggcaagtggtcccctaacctctgcaattccttcccagacaagagctcaaggggcagcccatgtcctcagggtcaaaaagttacatctgaaactaaccagctggtaaataaaatatgtccacttctccagccttgactaataatccttcctaacatgctagaaggccaggttcaaatttattttgaacttgctctgtcacccaggctggagtgcagtggcatgcactgaatagctcactgaagccttgatctcctaggttccagtgatcctccctcctcagcctcccaagtagctgggactactgcaccccacccagtttcaaatgtagaactcttggcctcactaggcacagtgtctcatgcctgtcactttgggagaatgaggctaggactttgagatcagcctaggcaacatagcaagaccccatctctacaaaaagttgtggggttttttttgttgttgttgtcgttgttgtttttaatcacaggcatggtggcagacgtctgtagtcgtagcttctcaggttcccaggaggctgagatgggaggatcatttgagtccaggagttcaaggtgcagtgagctacgatcatgccactgcactccagcctgggctacagagcaagaccctgtcttgaaaataaataacaaacacataaataaataaacaaacaaataaataaaaataaaatagaactcttggactcctcagagaccaatgctggaaagaggtgaactgtccccagcctgctctcttctctctctcccccatcccatttcatcctacatttcaagagatctcacattcacctgtgtggaccctcagtgctatgtccaagctctggccaccctctcccgctgtgagcatctcccttctgcctcacagggcatacacaggaaagttcaaagtccttggtcgcttcagtgtggctgagctggtggcggggtggggtgcaggctctactgggaaggttccctttggcccccaactctctgccctgcagggagcagtaagacctgaaactcaattgtcctctgtagagcagctcctgggaggacggagggaggggcaggtgtgggatggaggtgggcttctctgactctcatccttctggctgtctgtcttgcaaaggagatcatggggacttttgccatctgtttctccatgtgtctatctctatatctgcttttccttgtacttatctcttctctcctccctccttccctcctttcctccttcccttttctcttcatgtcttctttctctctcctctcctttccctccccatctctgtctatatcttgctctctccctgtcttgatacctctctccttcctctctctctccttccctctcttctctcttctttcttttgcttctctttttctcttctctcctgctatctatcttctatcaatctatatatctatcatctatcaacctatatctattatgtatgtatgtatctatctatctatcttctatcaatctatatatatatcatctatcaacctatatctattatctgtctatcatctatcaatctatctatcacctatttatcatctatctatgtatctacctatctctctctctactcaccatctatcacctgtctatcatctatctgtgtatctacctatctctctctctacctacccaacacccacccatccatccatctttctatgttctaccccctctctctcatcttccttccctatcattcggtctccctctgtctttttcccctttcttccctcctaactctccccatctctgcctctgtttctcccttcacccttccagttaccctgaggtaaacatccagaatttcaccaccagctggcgggatggcttggccttcaatgccctcattcaccggcacaggtaccacctggcctgggacagcccagtcctgcccttcagccccccatatccctgcagctgcacacctgtacatgtacttgtgtagatggcacacacagacataaagacccatcccttcacctctacacacacatacagttttctttcccttcacacacatgccctgcacatttacacacaggaacacacacccacacaggctcctgtccaggccacrtaccctgtgcacacatggacacacatgagccctcgcacagatgcatacacacacacagatacccacgcacgtgcacagcctgcccgcagggtaggaagctcgctcccctgtcactgtcatgctgctgtgtacccagcacctcctcctatcagaaaatgctttctcaggccaggcgcagtggctcacacttgtaatccctgcactttgggaggccaaggtgggaggatcacctgatgttaggagttcaagaccagcctggccaacatggcaaaaccccatctctactaaaaataaaaataaaaaattagccaggtgtggtggtgcgcccctgtagtcccagctactggggaggctgaggcaggagaatcgcttgaacccaggaggcggaggttgcaatgagccgagattgtgccactgcactccagcctgggcaacagagtgagactccacccctaacccccccaccaccaccaaaaaaaagaaaagaaaagaaaacacttcctcaaagtgagcccttagagtccccgtccctgtacacccacggattcataccttggggcctgacattgaaatagctgagggtcagacacccacacaaattagacacacatcatgatcattcgcatgacatattggggaaactgagactcaggcgcaggaaggggcttgtggtggtgtagctgaagccagaacccagctttttctgctgtggacacctgtccactcacaatccctgcttctcacacctacacacactcgtacacacatggggagacccagacccacctccatacacagaaactcacaagctgcaccagggtcatcctcacactaggtgacattcgctcagtgttttctatgcacaggcactgttctaagggcttcccactaaaacattcaatagtcaatgtatccattcagtgtgtccgatccacctatgggcaggtgctatttttatttatttatttattttgagggtgagtctcactctgtcccccaggctagagtgcagtggcacgatctcggctcactgcaacctctgcttcccagattcaagtgattctcctgcctcagcgtcctgagtagctaggattacaggcgcccgccaccacacctggataattgttgtatttttagtagagatgaggtttcaccatgttggccaggctggtcttgaactcctgacctcaggtgatccacccacctcggcctcccaagtagctgggattacaggcatgtgccaccacgcccggctaattttgtttgtttagtggagatggggtttcaccatttgggccaggctggtttcaaactcctgacctcaagtgatctgcccaactcagcttcccaaagtgctgggattacagggatgagccaccatgcccggctggcaggtgctattattatccccattttagaggaaaccaaagcacagagaaacgcagtagctcacctagagtgacacaaccaggatatgaccaagctggggctcaagctctgatgaactggctctggtcctcacacttctaaccactgcataacactacataagaatccccaaagtaagcatatgtgtgtcagaggtacatgtgtcctggccagacgcagtggctcacacctgtaatccctgcactttgggaggcctaggcaggcagatcacttgaggtcaggagttcgagaccagcctggccaacatggtgaaaccccgtctctactaaaaatataaaaattagcagggcctggtggtgcacacctgcaatcccagctacttgggaggctgaggcaggagaattgcttgaacctcggaggcggaggttgcagtgagctgggatcgcgcccctgcactccagcctgggtgacagagcgagactccawctcaaaaaaaaaaaaaaaaaaaaaaagaggtacatgtgtcctcacacaacacacataagggctgtacacactcgtattgtcatatgatttcacagagacatacacaggcaggcaccgtgtgggctcatctcttccaagcacactcaggctggcctacccattcgtctgtgtgcacaggccggcccagcaacaaatgcacatgcacacacacattcccgggaacgcacagagacatgcccgcgtccatcacactcacatcacagctaaatgctgcacagcacacacagcttgccccttggctagactgtgcccttctgcccattgccctgggcagtgctcagacaagggtggcttcttccctgcttgcccrccggctctggagcctgcctgctgcctgcctgctctgtgcccctgcccaggcctgatctcgtggacttcagcaaactcaccaagtccaatgccaactacaacctgcagagagccttccgcacagctgagcagcacctggggctggcgcggctgctggatcctgaaggtgagcctctcgcgggcccagcccagacttcgtcttgggggactcccaaccccaatgccatgtcacactcaactccatcccaccccagcaccatcccaaatcctgaggcctctccaaatcccaactctttccaaatcccaactgtctcctcagcctcctccccttgtgcctccccttcctcatgtgcgatccctcccacataccatcctcacacctcttcctctctcatccccaaccgtgtcccaacgtaacccctcctcttccccattctcaatttccacccatccccaacaccctccccaaccctgctttcaaccatctcccactaaaccaactcccactcccctaccccagccccaaacccagtggcatctccaacgccatccccacccctaacgccaaccccatcttcaagtgtctccatccccaccacatcttcggctccaactccattcctatccccaccctaatccatttccaamctcatttcgccctagcccatccccatgtctatctctcccacaactccatcctcatcctcasctgcttttccatttccagtcyatccctaatcccatccctgacttcagcctcagccccaaaccaggatcagccctgacacccrtctcccatcccaaattaaagctgctcccttcctctgagctctactgtgtgccagacacatgtctgggaaccttatcagagctgttcactttcatcttcacactgacctggttagagagaatttatcaaccctgttttattttattttwtttatttatttatttatttatttatttatttatttatttatttttttagatggagtctcactctgtcgcccaggctggagtgcagtggcatgatctcggctcactgcaagctccacctcctgggttcacaccattctcctgcctcagcctcccaagtagcttggactacaggcgcccgccaccacgcccggctaattttttgtatttttagtagagacggggtttcaccgtgttagccaggatggtctcgatctcctgaccttatggtccacctccttggcctcccaaagtgctgggattacaggcatgagccaccatgcccggcctatttatttaatttttgagacggggtctggctctgttgcccaggctggagtgcagtgccatgatctcggctcacagcaacctccacctcacaggctcaagtgattctcccatctcagcctcccaagtagctgggactacaggygtgcaccatcacacctggctaatttttgtatttttagtagaggtggggtttcatcatgttgcccaggctggtctcaaactcctgacctcaggtgatctgcccactttagcctcctaaagtgctggaattataggtgtgagccaccgtgcctggacgttttatttatttattgttcttatgttcatttatttatttatttgagacagagcctcgctctgtcactcagactggagtgcagtgggggcgatcctagctcactgcaacctccgcctcccgggttcaagtgattctcctgcctcagcttcccaagtaactgggactacaggtgcacgccaccaagcctggctaatttttttttttttttgtatttttagcagagacagggtttcaccattgttggccaggctagtctsaaactcctgacttcaagtgatctgcttgcctcgtcctcccaaagagctgggattacaggcgtgagccatcacacctggcttacttatttatttttttatccaactgaatttaatatttaaaccctgtttaattattattattatgtttgaaatggggtctcactgtgttgcccaggctggagtgcagtggcacaatcttggctcactacagcttcaacctcctgtgctcaagcaatcctctcacctcagcccccagagtagctggggctataggcgtgcacgaccatgctcagctaatttttgatttttttttttttggtagaggtggggtctcgctatgttgcccaggctggtctcaaactactggactcaagcgatcctcccaccttggcctcccagagtgcctgggattacaggcccgagccacatgcctggcttaacctgtcttccaaagtgatgagaatgacagctcagggatgttgtcacttgcccagcatcacactgaaaatcaggaaaccagaccttatggctccagaattcatggwcttaatcagtcctctaccctgcctcttatagctgtatcctgtgctcagtgcctggtacgtagtaggtgctaatggatgtcagttggacaaggcagtgaagaataaaggccaggtatactgttgtgcatccagtgggtaaattaaaatgatatcactcagtcatggtgatggcttgtgcctgtaatcccagcactttgggaggttaaggcaggaggatcgcttgaggccagaagttcaggaccagcctgggcaatgtagtgaaatcccatatctacaaacctgtagtcccagctacacaggaggccaaggcaggaggatcacttgagcccaggagttcgaggctgcagtgagctctgattacaacactgcaccccagatcccaactcaaaaagcaaaaaacaacaaccaattaaagtgatgttagaatttgttgagtttcccctctgtgccaggctagtctttctaatacttacattgttcccaggaggcaggaaccatgataatctttattataacaatggggaaactgaggcttagagaagctaggttattttctaaggacatgcagtgagtaagtgttgaactgggatccaagtgcatgctgcctccaaagcctatgttcttgacatcaagccttgtgcacaatttgcaagctaactaaattttaatttagcacctactgtgtgctgggtaagacagaacagtgataaagaagataggcatacggctgggcccacgcctatagtggcccacgcctatagtcccagcactatgggaagctgaggcaggagtattgtttcagcccaagagttcaagactagcctgggcaacacagagagaccctgtctatgttttataaaaaataaaaagtctatttaaaaaattacaaaaaattagccgggcgtggyggtgtgtgcctgtaatctcagctacttgggaggctgaggcatgagaattgcttgaacctgggaggcagaggttgtggtgggccaagatcacgccattgcactccagcctgggcaatagcttgagactgtctcaaaaaaaaagaaagaaaaagaaaagaaaggaaaggaaaggaaaggaaaagaaaggaaacaggcatagtgtttgtcctcatgaagctcaagctctagataatgacataatcacataagtgaatatgtaattacaaattgtgatacattctgggaaggacatcataagatgctaagaggagaataacatgaggattatcaactatagacagagtgaacatggaggcttgtctaaggaaatttgagttgagccaggcatggtggttcacacctttagttctgactactcaggaggctgaggtgggaggattgcttgaacctaggagctcgaggctgcagtgagctatgattgcaccactgcrcaatcagcctggacaagagagccagactccatctcttgaaaaaaaaaaaagtaaaaagttgagctctgaagaataagtgggaattaggaacacagaagaggaacagtgctccagacagtgagaacagcacatgcaaaggccctgaggtggaaggtagaaaggtgtgttcaagaaacaaatataggccaggtgcggtggctcacatctgtaatcccagcactttgggaggccgaggtgggcggatcacctgaggtcagcagttcgagaccagcctgaccaacatggtgaagccctgtctctactgaaaatataaaattagccaggcatggtggtgcatgcccataaccccagctacttgggaggctgagacagaagaatcacttgaacctgggaggtagaggttgcagtgagttgagatcgtgccattgcactccagcctgggcaacaagagcaaaattccatcttaaaaaaaaaaagaaaagaaaaagaaaagtatagcttatttctctgcggtggtttatatgtgtcaggcactatttaattccaggaggtagatttctatttgacggatacaaaacctgaggaacagagaggttaattatcttgcccaaggtcacacagctagtgagagtggcttctccatccctccatccaataccttcaagcactctgtcaaagtgcccactgtcttgtttccccactccctcttgcttccagatgtgaacatggaggctccagatgagaagtccatcatcacctacgtggtctctttctaccactatttctccaagatgaaggctctggctgtggaggggaagcgtatcgggaaggtataaggagccaaggagtgggtgagtgggaagctggaagctggtggcaggcacgggtgggatgaggctgaccccccttcctctgctgtgtcaggtcttggaccaggtrttggaggtggggaagatcatagmacgctacgaggagctggcggctgagctgctggcctggatccaccgcaccgtgggcctcatcagcaatcagaaatttgccaactccttaagtggggtgcagcagcaactccaggctttcacggcctattgcacgctggagaagcctgtcaagtgaggcccagctctggagggagggtgggcaggggtggcatgacggcagggctcctgagctcatgccccttcaggttccaggagaaggggaacctagaggtgctkctcttcagcatccagagcaaactgcgtgcctgcaaccgtcgcctctttgtgcctcgggagggctgtggcatctgggatattgacaaggtgaggccggggatgcaggggagaggcggggttgcactgtggagttgtataggttgcacactgctcaagggaatcattcacattgtagacatgatggattagatattcattctgacagtttttcagtagtaaagtgtcataaggaagcaatattttttccaatttgcatgaagttgccataatgctatgagtgacctcagactaagtcaagaccattaaactgtggggagctgtcagagtctgagtgcctcctcccatctcctgcaggcatggggtgagctggagaaggctgagcatgagcgggaggctgccctacgggctgagctgattcggcaggagaagctggaactactggcacagaggtttgaccacaaggtggctatgagggagagctggctgaatgagaaccagcgtctggtctcccaggtacaaggtgtagggcttggctccagggtaaagggayggagggcggggctgatggtcctgggaccagagagggagacttgatcttctaggcaacagggaagagttagattagtctcctggtgataaatgaggatggggatgggagacttggccttccaagtgattgttgggtgaggggaatgggcctgatctccagggtaatgggagagtgaggctggtctccagggtaactagagagggcagaattcatcttttcaggaatgggggagtgttttaagtgacaagggaggttgtatcttgtgtctagggtaactcagaaggatagaattggtttcctaagtaacagagtcaggtaaacctggtccctaatctccaggacaggggaagcatgggcctccttcctgggtaacaagtttaaggttagagatgtaacaggagggtgggacttgtttccagggtaactggagagagtggggctggtctctggggaaacgggaaggtggggttggtctctagggcaacaggggagggtgggtctggtctccagggtaactggggaagattgggctggtctccaggacaacaggggagggtggagctggtctccaggataactgtggaagatgggctggtctccagggcaacaggggatggggggttggtctttagggtaactggggagggtggggctggtctccaaggtaacaatggagggtggggctggtctccaggttacctgggtaacaggggaggatgaggctggtctccaggataactagggagggcagggccagtctccaaggtaatggagtggggagtccccagggtcacacagggtcaaggtaacaggtggactgctgaggcagcatgggtgagtgtctggctcactgccccaggacaactttgggtatgagctgcccgcagtggaggcagccatgaagaaacacgaagcgatcgaggcagacattgcggcctacgaggagcgggtgcagggtgtggcggagctggcccaggcattggcagccgaaggctactacgatatccggcgggtggcagcccagcgtgacagcgtcctgcgccagtgggccctgctaactgggcttgtgggtgcccggcggacacgacttgagcagaaccttgccctgcagaaggtcttccaggagatggtgtacatggtggactggatggaggagatgcaggtgccggsgggggggcggggatgcgggtggagtgccaggagggaggggaggatgcagacgctgaaagagttgtcagacagctggagatggagagggaagggcagagatagaagaagatagagagaaagccagggagacaaaaagagagaacaagagagagagggagagaaagatacagagatggacaagagaggcagacaaagaaacacagaatgagaaagagacagagacaaatagagagaaatagaaacatgctggacacggtggctcacacctgtaataccagcactttgggaggccaaggagggcagatcacttgaggtcagcagtttcagaccagcctggccaacatggtgaaaccccatctctactaaaaatacaaaacaattagccgggcgtagtggcgggcgcctgtagtcccagctacttgggaggctgaggcaggagaatggcgtgaacccgggaggcggagcttgcagggagccgagatcccgccactgcactccagcctgggcgacagagcgagactccgtctcaaaaaaaaaaacaaaaaaaacaaaaaacaattagctgggcgtggtggcgtgtgcctgtagtcctagctatttgggaggctgaggctcaagaattgcttgaatccaggaggcagaggctgcagtaagccaaggtggtgccactgcactccatccagcctgagtgacagagtttgattctgtttcaaaaaaaaagagagaaatgaaaaaagacatagagatatagaaacagagtaaaccagggatgcagacagagagatagtgacagtttgagagagaggaaatcagagagacagagagaggagaaggcagacacaaaggtgacatggaaatctacatgactacagagaaagatacaggaagatggaatcaatttaagagagagagagagagacctaccagatctagagagagatgagacaagaaagatagaagccagctgggcatggtggctctcacctgcggtaccagcactttgggaggccgaggtaggcagattgcttgagccccagagtttgagaccagcctgatcaacatagtgagatcctgtctgtacaaaaaaaaaaaaaaaaaaaattagctaggcgtggtggtgtgcgcttgtagtccyagctactctgaagtgggaggatcgcttgagcccaggaggttgaggctgtgtgagccatgattgcaccactacacttcarcctggatgacagagtgagaccctgtctcaaaaaaaaaaaaaaaaaaaaargaagaagccgggcacggtggctcacacctgtaatcccagcactttgggaggctgaggcaggcagatcatctgaggtcaggagttcaagaccagcctggccaacatggcgaaaccccatctctactaaaaaatacaaaaattagccgggcgaagtacatctaatcgggaggcaggagaatcacttgaacctgggaggtggagtttgcagtgagctgagatcgcgccactgcactccagcstgggtgacagaggcagactctgtctcaaaaaaagaagaagaaaaaagaatgaaagggaggaaggaaggaaggaaggaaggaaggaaggaaggaaggaaggaaggaaggaagaaaagaaaggtgaacaggagacacagacaggaaggtgaacaggagatggagagaaagagaaaagggtagaaatgtagaaagagaggcagagaaagatggagacaaagatgtatagataagaaagacatggaggcagagagtgagccactgtgacagagacagagcccagaaatgtggagtccacgagagatggaaacattcagagagagactggtagagagagagggagacagagacagaacaccatggctagctgtgagagctgacagcagctggggctcagcttttttctttctgatgaggaaaccgaggtccaggccacagagctggtaagagagtcttgaggctggtccatatctctccaagagggtcagagtcgggagtgatggtgcagagtagcaggggctggcataggcaatgggggagaggtgagtggyccagggcagtgccagaggtgtgctcagtgctgtccccgcttgtaggctcagctgctgtcccgggagtgtgggcagcacctggtggaggcagaygacctgttgcagaagcatggactgctggagggagacattgccgcccagagcgagcgggtggaggctctcaatgccgctgccctgcgcttctcccagctgcagggtgagtcttggggctggggctggggctatgggtggagactgtcaggactggtgctaatagaggcaagagtgactcctgagagaaggaaagagtgagctccttrtccttggaggcatttaagcagagcctaagattacattccactggggaagtcatagggagaatcagtgccctgagtggcaggatgggccactcgacctcttcctgctttagattctgcagtaataacccacatttattgagcacttgttatgtgccaagcccttcacagattgatctcaacgaataccatttaaaaagacttgtgtgggctgggcacggtggctcatgcctataattccagcccttttggaggccgaggcaggaggatcacttgagcccaggaattcaagaccagcctggccaacatagaaagacatcatctgtaccaaaataaataaataaataaattagccaggcacggtgatacaagcctgtagtgccagctatttggaggctgaggcaggaggctcacttgaggccaggaattggaggcttcagtgagccatgatcatgccactacactccagcctgggtgacacagtgagatcttgtctcttaaaaaaccaaaaagaaaacttgtgctaagtaatgttaatcagggcctatttaacacaagtgatagaaactcagttcaaatggcttaaggtgaaaaggagtggattggctaatgtaaccaaaatgttcagggaagcctagtcaacatggcgaaaccccgtctctaccaaaaatacaaaaaattaggtaggcatggtggtgcacgcctgtagtcccagccactgcagaggctgaggtgggagaatcacctgagcctgggaagtcgaggctgcagtaagccaagattgtgccactaaactccagcctgggcaactggactgagaccctgtcagcaaaaaaataaaataaaawaaaaaaaagtctggggaagggtgggttttacctcaggcatggctggatccaggtatggctcaagggtgcttttaggactccatctgagaccaggcatggtgtctcatgcctgtaattccagagctttgggaggcaaagatgtgaggattgcttgaggccaggagttttgggcaacatagtgagaccccatctctatatcaaaaaagaaaaaaaaaagaaaaagactcaggccaggcacggtggctcatgcttgtaatcctaacactttggaaggccgaggcaggcggatcacttgaggtcaggctttggccaacatggtgaaactccgtctcttctaaaaatacaaaaaaattagccggacatagtggtgcacacctgtaatcctagttactcaggaggctgaggtgggaggattgcttgaacccaggaggcagaggttgccatgagccgagatcgcaccactgcacactccagcctaggtgacagagcgagactccttctcaaaacaaaaacaaaagactccatctctctcgtctctctccatcactagtctttgtgttagtgtcactgttgagcagtcctgtcccttgtggtataaatctgggatcattcagccccaggtatacagcctaacaggttagcagagccaatgggacccaggcccctttctcccaagagttctgacaaaaagtcctaggagagcttgcattggctcacagtgggttccatcattgctcagccaatcattgtggccccagggcatgcagtgatctaatcggccacatgcatgtgacctgcctaccccagggccaggagtggggtcagcccattacaaaggcttagactgaaaaagaggagagagggacggccttaccagatatggatgggacatggatgctgataggcaaaaccaagactggctctaataaggttcctgtcttacttatgtcaatgccctccagccagagaccaccaggagtccctctgtggtcaaacgaagttgggtttggtggctctttacacccaccatggggagctgtggggcttctcagcaagaaagtatgatggggggctaggcgcggtggctcacgcctgtaatcccagcactttgagaggccaaggtaggtggatcacatgaggtcaggagttcgagaccagcctggccaacatggtgaaaccccatccctactaaaaatacaaaaaattaatttggtgtggtggcatgagcctgtaatcccagcaacccagaaggctgaggcaggagaatcgcttgaatctgggaggcggaggttgcagtgagcctagatcgtgccactgcacaccagcctgggcaacagagcgagacctcatctcaaagaaatatatatatatatatgactggtggcttattgtaggatttgggcttgtgttaggtgatttggaagatgattcagtgtagtgagttttgctgtggattggatgctgtcagaatatgggggtgactaggtgattgggggtcttaatcattttgatctaggtggtgggaggaagagaaggaggctgttgcattcattggcagctgtcattcatctgagccggygaggggatgcgtggtcatttttgtggtttgcacagtgaccttgattttgtctgtgctcaggcaagattatggagcgagcttggttttgtcctactccatcgyggtcagagtggccccatctgatatgagcgttctgtgagttttttttattattattgttgttgtttattgctttttttttttttttttttagacacttgatctctctatgttacccaggctggtcttgaactcctgggctcaagcaatcctcccgcttccacctcccagagtgttgggattacagacgtgagccattgtccctggccatttctgtgagattattatttttacttatttatttatttttgagatggagttttgctcttgttgtccaggccagattgcaatggcgcgatctcggctcactgcaacctctgcctcctgggttcaagcgattcttctgcctcagcctcccgagtagctgggattataggcatgcgccaccatgtccggctaattttgtatttttagtagagactgggtttctccatgttggtcaggctggtctcaaactcttgacctcaggtgatctgcccgctttgtcttcccaaagtgctgggattacaggtgtgaggcactgcgcttggcctgtgagattatttatactcctcagaacacgatggctagccctgagtgctgacggcagttggggctgctttatttctttctcactgatgaggaaactgaggcccaggccatggagctgataagagggtcttgaggctggtccgtatctctccattaagatgttctcctcctttatctggagcccacagccctttggaatcttggagcattattcgaaaaggaagaacctgtctggcttgcaggttgatggggaagtttctcaccctagccgacctgggtcacatcctaaatgcaaatgctgaagtttccctccacgccctggtgtggacatcctgaccctggctcagctccctcccatccccatctcacctccaggggaggttgttgggaccctctccttcaccttagctaggtttgtctcaggaagctccctttgccctcgccttgtgaattctcggctcctgtgacaatcagcagctccgagaatacagcagaggggccagtgtggggagtgcgagtgtggggagtgcgttgtcatggggatgggaggcagcgcttcctgatgggtggtccagagtgtgagctcctgatgggccacttcttagctgatcctagggcaatccttcccctctctgaggctcagtctcttaatctggaaaatggggctgataaggacactggcctcataggatggttgtgagaatcaaatgacattgtgtcagagtaagggctgggtacatggaagctgttttttttttgttgttgttgttttgttttctaagacagagtctcactctgttgcccaggctggagtacggtggcactatctcggctcactgcagcatcaacatccctggctcaagtgatcttcccacttcagcctcccgagtagctgagactacaggtgcacgccaccatgcccagctaatttttgtatttttggtagagatggggttttgccgtgttacccaggctggtctcaaactgctgacctcaagtgatctgcctgcttcggcctcccaaagttaggattacaggygtaagccactgcgcctagcaagaagctgttgttattgtaactattattcagttggataccttgtggtttgagtcaacatcagygaatgtccagaattacagaaatcccgcattccacatagggcagtgtctcacttttatgatccagtaagaaatacacagccaggcagtggctcacgcctgtaatcccagtactttgggaggccaaggtgggtgaatttcttcagcccagatattggagaccagccagcgagactctatttctacaagaaacttagaaaaaaaattagccaggcatggtgttgtgggcccatagtcccagctactcaggaagctgaggcgggaggattacttgagcccaggagttggaggctgcagtgagccatgatcatgccactgcactccagcctgggtgatagagtgataccctatctctaaaataaataaataaataaataaacacacttacctcatgactcacagttcacatgcatacatgggcacacaggctaacacagaggttttataaaacaatacttccaggctgggcgcggtggctcaggcctgtaatcccagcattttaggaggctgaggggggcggatcatgaggtcaggagttcgagaccagtctggccaacatagcgaaaccccatctctactaaaaatacaaaaaaaaattagctggacatggtggcacgcgcctgtaatcccaactactctggaggctgaggcaggagaatcacrtcaacctgggaggtggaggctgcagtgagctgagatcaagccattgcactccagcccaggcgacagtgagagactctgtctcaatcaaacaaacaaacaataccaaacaacaacagcaacaacaacaaaaatactcccccgaccttgttttgcattgtgatattttccgttccttctattctattccaccaaacaaatgctggctgtgacccattaaattaacttcactgttttctartcgccaactagccatccaggaggaaggtgaactatttaaggaaaaagagggagttcggggttaagcacagtggctcatgcctataatcccaacacttcgggaggccaagtggaaggattgcttgaggccagccgttcaagaccagcctggccaacatagtgagatcctgtctctattttaaaaagaaaaaggagtgcagataaccactgggattgatagataatgcaacagaggatgacagagggaacctagaaacatggtttaagaaaagagaagttggccggtggcagtggctcatgcctgtaatcccagcagtttaggaggccaaggcgggtggatcactkgaggtcaggagtttgagaccagcctggccagcatggtgaaaccccgtctctactaaaaatacaaaaatgagccaggcgtggtggcgggcgcctgtaatcctagctactggggaggctgaggcaggagaatcgcttaaacctggaggtggaggttgcagtgaaccgagatcgcgctactgcactccagcctgggcaacagagtaagaatctgtctcaaacacacaaacaaacaaaaaacaaagaagtttcatttgactcagttctgacataagcacaattttcactcaaatatacagaatctgagatgctctgaatccatccatcattcagtcaacaaatcactacattcactaggctacagctctgggctccaccctttgctgggcagtgtttgggatagggtgtgacagacccaggtcctgcccttaaggagctctcagtccagtgggggagacaggacaaggcaatgacaacacagagtagtcagggctaggatggggaagcagagaagcctgagagggtcgaggaggagcctgctccagccttggggtgtcagggaaggctgcctggaggaggagccacgtgacccggcatctgatgaagtcacaccaaggacagggtaggtagcccgcaccatcctctcttgggcgccccttggcttgtgaccaatcctggatgctccccttctcctggctcaggctaccagccctgcgacccgcaggtcatctgcaaccgcgtgaaccacgtgcacggctgcctggcggagctgcaggagcaggcagcgcggcgacgcgcggagctggaggcttcgcggagcctgtgggcgctgctgcaggagctggaggaggccgagagctgggcgcgcgacaaggagcgtctcctggaggctgcgggcggcggcggtgcggcgggcgcagcgggcgcagcgggaacagcgggcggcgcgcatgacctgtccagcacagcgcgcctcctggcccagcacaagatcctgcagggcgagctgggcgggcggcgrgcgttgctgcagcaggccctgcggtgtggcgaggagctggttgcggccggcggtgccgtcggcccgggagcagacaccgtgcacctggtaggcctggcggagcgcgcggcgagcgcccggcgccgctggcagaggctggaagaggcggcggcgcggcgagagcggcggctgcaggaggcgcgggcgctgcaccagttcggcgctgacctcgacgggctgctggactggcttcgcgacgcttaccgcctggcagccgccggtgacttcggccacgacgaagcttccagccgccgcctggcgcgccagcaccgcgcgctcaccggggaggtggaggcacatcgcgggcccgtgagcggcctgcggcgccagctggcgacactcgggggtgccagtggcgcagggccactggtggtggcgctgcaggtgcgcgtggtggaagcagagcagttgttcgctgaggtgaccgaagtggcggcgctgaggcgccagtggctgcgggacgcgctcgctgtctaccgcatgtttggcgaggtgcacgcgtgtgagctgtggatcggcgagaaggagcaatggctgctctccatgcgtgtgccggattcactcgacgacgtcgaggtggtgcagcaccggtgagcgcgcacatgtgggactccggggtccccttcctcatgcacccagtctcaccttcattggctcaacagttcccatgtttgctcagctggaactaggagttccaatccctgcttcacccatagccagctttgtgacagttctgcaacctgcctaatcttcctgaacctcagcttgcccacctgtataatgggggtgatattagtccctacccaggcttgtgatgaacggtaaatgagttcatacatgcagaatacgaagcaaatgcctgggggtagaggaagcattcccccagcatttgctcttgttacccaggcttacattcgccaagcatgaaatcaacgacctatgcttctacagggacacctcagcctggcccctctgctgggaggcctcccattgcttctgcataaatgtcacctccctagctactaaaatagctctgactcttgtgattttccattgtttcatcctgttttacatttctttgtagcacttaccatcccatgacatattgtatactgacttgtctgttggctgacttagcaatgagttgttcaattagtgggtgaacaatgcctattccccctctgcaccactctstctgagcatcttattcatccatacattcattcagcaggtgtttactgagtgcctatgcctttctaggtcttgtgctgggcactgctggaaacacagggctgctccttgcccctactgtgcctgcagttgcccagttctttgaaacattgatttaaagatgggaggaccatgtctagcttaaagtagacctcagtggctgccatgtggagggcaggttggagcgggtaagagttgtggctgggaacccagagaggcaactgggctggggacccagatggagcggaacaagattagaccagggcgggaggtaagtaaacaggccatggagactgatgggctggagcgattttccaaaacaaagcccagggctctggcctggcagatgacagtgctgtccccaacatgggggcccagaggaagaacaaatttgagtcaggtgggtgtgaatagccccaagaaggtatacagtaggctttgaggtcgaagacaggttcaaaaggtaagaggttgaggctggagactgaggtgtgactgtcatgagttcaggggcaaagaccaaggctgtggggctgggtggaatcattgaagaagggtgtgaaggaaaacccagagggctcagggtggagttgctgctgaggaatctcacatttaaacatcaggtagaggctgggcgtggtggctcacgcctgtaatcccagtactttgggaggccaaggcaggtggatcatataagatcaggagttggagaccagcctggctaacatggtgaaatcccgtttctactaaaaatagaaaagttagctgggcgtggtggcgcatgcttgtaatcccagctacatgggaggctgagacatgagaatcgcttgaatccgggaggcagaggttgcagtgagccacaatcgcgccactgcactccagcctgggtgacagagcgagactctgtctcaatacatacatacataaattaattaaattaaattaaataagttaaattaaattaaataaaataagcagcaagtagaagagaaggagcccacaaaggaggctgaaaagaagggtggattgagaattaggagtagaaccagtagaaggtatttcataaaaccaaggtccgcagggttcgggtgtctgagcatctccatcctcctgcagattcgagagcctggaccaagagatgaacagcctgatgggccgcgttctggacgtgaaccacacagtccaggagctggtggaaggaggccaccccagttcagatgaggtgcgttcctgccaggaccacctcaacagcaggtaggagggcctggggctgggagtccctcccatccttcccttccacactcacacagccatggacagcaagatgtgcaatctcaaacccctggaatcataatggccacccgataaatcaacaaaatgttgaccaaaaatcataatccctgatactggtgatgacgtggtaaaattaaaacaacatttcagttggctgttcatttatttgtccagaaagaatgtattggatatctacaatctgccaggagtattcccaagcactttatatacctttctaaagtatcccaacattcttccgggcacagtggctcatactgtaatcccagcacttcaggaggctgagatgggtggatcacttgagctcatgaattcaagaccagcctgggcaacatggtgaaaccccgtctctctctctacgtgcgcrcacacacacacacacacacacacacacaaaatatatatatacacacacatatatatacacacatatatacgtatatatacacatatatacgtatatatacacatatatacgtatatatacacatatatacgtatatatacacacatataygtatatatacacatatatatgtatatatatatacacactatatatatgtatatatatatacaaaatttagccaagcatggkggkgcacatttgtagtcccagctacatgggaggctgagttgggaggatgccttgagcccaggaggtagagattgcagtgagcagagattgtgccactgcactccagcctgggcaatagagccagaccttgtctcaaaaaaaaaaaaaaaaaaattcccaatatcccaatttccatagtaaagatcctagaattcagaactctctctctctctcttttgagacaggatcttgctctgttgcccaggttggaatacagkggcatgatcatggctcattgcagcctccaacacctaggctcaagcgatcctcccacctctgcctcctgaggaactgggactacaggtgcatatcaccatgcccagctaattaaaaaaaattttttttgtagagacagggtctcactgtgttggccatgctggtcttacaactcctgggctcggctgggcgtggtagctcacacctgtaatcccagcactttgggaggccaaggcaggtggatcacctgaggtcaggagttcgagaccagcctgaccaatatggtgaaaccccatctctactaaaaatacaaaaattatccgggcatggtggcatgtgcctgtagtcctagctactcaggaggctgaggcagaagaattgcttgaacccgggaggcagaggctacagtgagccaagatcacaccactgcactccagcctaggtgacagagcaagaatctataccaaaacagacaaacaaacaaacaaacaaacaaaaacctcctggcctcctcccaccttggccttccaaagagctgggattacagtgtaagctactgctcctagcccagaactctttaagataagtaacaaactaatatcagtacctctggaatactaccagcaattctcccagtgcaggtggggttcatagatgaagatacaagtccaaaaaggtgaactccttatccaagattactcagtctataagtaggagtcaaatacagttctggctgaatcctgagctgtagctgtttatctaatatatccagtcttcctggtaacactatgaggtggaaactaccccacattagagaggagaaaactggatctcagagaggcgaagatggaggcccaaggttacacagcaagttaggggatcaaaccgggctttgaagatggatatgtttgacttcaaagactgtgctctttttttttttttctttcttgagacagggtcttgctctttcgcccagactggagtgcagtggtacgatcatggctcactacagccttcaccgcccccgacccgagctcaagaaatcctcctgcctcagcctcttgagtagtgggactatggatgcacaccactgcacccggctaatttttgtattttttgtacagatggggtctcactctgttgcccagactggtctcgaactcctgggctcaagtgatcttctgccttggcctccgcaagtgctggaattacaggcatgagccactctgccccacccaaagactacgctcttgactctgtgctgcaagattccaatatccagggattttaaaacctctgtagccaagaccatcgcaaagcatccaggcctaaaaaaataactacaatcataacgatttacagcatgtagagagatctatatgccaagtgctttagccacatgatctcgttacacactcaatgaagtggactttattatccccattttccagatgaggaaactgaagatcagagaaggaaatgatttgcccaaggtcacatggcaaatctggccagagcagaacttgaactcgggtctgcctgatttcagagtcctaatctctgtcctcatggtgtgtccattctagagggggcagaaagacagttaaatacactaataaatggacaagatatttagagaatcataatggctttatgcaagaaacaggcagggcatggtggctcacgcctgtaatcctagcattttgggaggccgaggcaagcagatcacttgaggtcaggagtttgagaccagcctggccaatgtgatgaaaccccatctctattaaaaatataaaaactagccgggtgtggtggtgcacgcctgtaatcccagctacttgggaggctgaggcaggagaatcccatgaacctgggaggcggaggttgcagtgagctgagatcgtgccactgcactccagcctgggcaacagagcaagactctgtctaaaaaagaaaacaaaatttaaaaaacccaaactattgaggaccccaagagcttgttttagtgggtcatatctattgctatttactatattagaacttagtactgagaaaatttaaaatgtttttatttttatttatttattttgagacagggtctcattactctgtcacccaggctggagtgcagtggcacaatcatggctcactgcagcctcgacttcgcaggctccagcaatcctcccatctcagcctcccaagtagctgggaccataggtgtgcacccccacgcccagctaatttttgtattttaggagtctcaccatgttgcccaggctgctctccaactcctgagctcaagcgatccacctgcttccgtcttccaaagtgctgggattacaggtgtgaaccactgcacccggctgagaaatttgaaaacattatttaaaaataacaatacactgggagtggtgcgtgcctgttagacctgtgaggctgaggtgggaggaccgcttgagcctgcgaattggaggcttcagtgtgccataaacgagttcatgaatagccactgygttctagcctgggcaacatagtgagatctcacgtcttaaaaaaatttttttaaatctaaatatctaacgtgttaatataacttttttattaaaaataacttttcataacacaaaatgtactaagagtggcattgtttcgtacctttgcaaatctctttaaagtctggtttaagagatggcagctgggcttctcttaaatcagagtcggcttctgctctcagtctctcctgccgcctctggaaaactccactgaacactcgggaaagaatgagagtgaaaaagcaaatggcgtcttaacacatttttatgaagatagttttgtcctctatcagattacatgttgagaatggctgccctaagcaaaagtgctgcgtagggttccattttacaccggcagaaactggagaaactttctgaggtcacacagtggctgggtggcttgggcctggattctaccctgggtcrgcgggccctccgcgcccaagaggagtccctgtcctcctcaagtcactctctttcccctgggcaggtggaaccgcatcgtggagctagtggaacagcgcaaagaggaaatgagcgcggtgctgctggtggagaaccacgtgctggaggtggccgaggtgcgcgcccaggtgcgtgagaagcggagagctgtggagagcgcgccccgggccggcggcgccctgcagtggcgtcttagcggcctagaggccgctctgcaggcgctggagccgcgccaggcggcccttctggaggaggcagccctgctggctgagcgcttcccggcgcaggcggcgcggctgcaccagggcgcggaggagctgggcgccgagtggggcgcgctagctagcgcggctcaggcctgcggcgaggcggtggcggcagcagggcgcctgcagcgcttcctacatgacctcgacgctttcctggactggctcgtgcgcgcccaggaggcggcgggcggcagcgaggggcccctgcccaacagcctagaagaggcggacgcgctgctggcgcgccacgctgcgctcaaggaggaggtggaccagcgcgaggaagactatgctcgcatcgtggcggccagcgaggcgctgctggccgccgacggcgcagagctgggcccgggcctggcactagacgagtggctgccacacctcgaacttggctggcataaactgctcggcttgtgggaggcgcgcagggaggcgctggtccaggcgcacatctaccagctcttcctgcgggatctacgccaggcgctcgtggtgctgcgtaaccaggtgcccactcggggtgtacatttcggagagggagagtccgaggccgcggggggattgcagggacagggacatgcgggggtggggaggagggtgtttcctgggaccactgggttctgaggtgggtgggaggtgagagagtatccggaatggataactgagtttgtggaacatccagtgtgtgtggaagtgtgtatgtaacagaatttgaggagtatcatcagtggggtaggttggtgtcttatcggaggtgacagtttgtgggctatcccgagtaagtaatgcacgaggatatttattggagtggcttcctgggttcgtggattatctgaaaggaaataagactatgaggttgattggcgatggttaaatggggttcaaagaagatcttggtatggataacaaaggattaggattatggaggtaggtaacaggctgaggggttattggagtcagtcagtgattgtggattacatggtgtggatggctaaattagcacaatatcttcatttctgggaatgacaactatggattctctggagagagtaactgtgtctgtggcatgaggaaccaagtgcagtggttatctggggacagccaatccagttgggagatcactctgggatgggaaccaagtttgagaattttggcaagatggaacagccagttttcagattgtccagtgtttggggatcatgttagaaagggtgcctgcctgtactggttatataagggatgctgacccagtttgaggattatctacagcagtggtccccaatcttttttttttttctttagatagagtcttgctctgtagctaggctggagggcagtggcgtgatctcagctcactgaaacctcagcctcccgggttcaaacgattctcctgcctcagcctcccaagtagctgggactacaggcgcragccaccatgaccagctaatttttgtatttttagtagagatggggtttcaccatgttggccaggatggttttgatctcttgacctcatgatccgcctgcctcggcctcccaaagtgttgggattacagacatgagccactgcaccaggcccagtccctaatctttttggcaccaaggactggttttctggaagacaattttttccacaaaccggtgggaaaagraggaatgttttcaggatgattcaagcgaattacatttattgtgtgctttatttctattgttattacattataacatataatgaaataattataaaactcactataatgtagaatcagtgggagtcctgagcttgttttcctgcaactagacgttcccatctagtgacatctaggggtgatgggaggcagcgacagatcatcgggcattagattctcataaggagtgtgcaacctggatcccccacatgcgcagttcacaatagggtttgtgttcctatgagaatgtaaagctgctgctgatctgacaggaggcagagctcaggcagtaatgctcactcgccccccctccacctcctgctatgcggcccagtttttaacaggcgatggactagtacccctctgtggcccagggcttgggaaatcctgatctagggagtggaggagaaaggacagagagcccctgaatcataagattactaaatatggagctgaagtggccttgagagaccctttctgacccacccatttaaaaaatagagacaggatcttgctatgctgcccaggctggtctccagctcctgggctcaaacagtccccctgctttggcctcccaaagtgctgggattgcaggtgtgagccaccatgcccggccctgacccactcattttactagttagaaaactaaccccagagggaaaagaacttccttgagttcacacagtacccagtttagttgtcttctttttttgagacaggacctcactctgtcacccgggccagagtacagtggcacgatcatgactcactgcagccttgatctatggggctcaagcaatcctcccacgtcagccctccaagtagctgggactacaggcacgtgccaccatgcctggttaattttttgtatttttagtagagatgggatttcaccatgttgcccaggctggtcttgaactcctggggtcaagtgatcctcccgcctctgcctcccaaagtgctgggattataggcatgagccaccgtgcccagccttcagtcttcatagtaaccaattttttttttttttttttttgagatggggtcttgctctgtcacccaggctggagtgcagtggcgtgatcttggctcactgcacctcctccgccttctgggttcaagcgattctcctgcctcagcctcctgagtagctgggataacaggtgtgtgccactacacccggctaatatttgtatttgtagtagagatgaggttcaccatgttggccaggctggtctcgaactcctgacctcaggtgatccacccacctcggcctcccaaagtgctgggattacaggcatgagccaccatgtccggcctaatattaaccaaatatttactgagtgcctcctctgtgctgggcgctattttggggctgagcacactcaggcaacaaaatacaaaatcctgccctcatgtggttgacattctagtatgtaggggaggagagagtaaacaagtcaatgcatcgctaatatnnnnnnnnnnnnnnnnnnnnnnnnnnnnnnnnnnnnnnnnnnnnnnnnnnnnnnnnnnnnnnnnnnnnnnnnnnnnnnnnnnnnnatggtgaaaccccgtctctaccaaaaatacaaaaaaattagccgggcatggtggtatgcacctgtaatcccagatacttgggaggctgaggcgggagaatcacttgaacccaggaggtggaggttgcagtgagccgggattgcaccactgcatccagcctgggcaacagagtgagactccatctgctccctccctgccaaaaagaaataatacaggagggtagtgggatagggctggggtgggagttgataaatttggcaggttggtcagagacctgaagaaagtgaaggagccagccatgggggtatctggagggacagactcccaggcagaagcaccagcatgggcaacagccccgaggtgggaccacaactggaatgttctatgcttgcaaggttgcggggagtggtggcaagccaggctggcagcctctcccaggtcctggaatggaatgaggctgacctttgcaccacgctccctcctccccaggagatggcgctgtctggtgcggagctcccgggcacagtggaatcggtggaggaggccttgaaacagcaccgtgactttctcaccaccatggagctgagccagcaaaagatgcaggtggccgtgcaggctgcagagggcctgctgaggcagggcaacatctacggggagcaggctcaggaggctgtgacccggctgctggagaagtaggtcccctagacccatccaccccagggagggggcagaagatggggcccagcataggggagtggtgtgggaggccagggtcccactcctttcatcacgatttctgcttctctggggctctttcctatttctatttaattccatgttgtcttagatttgatttaagtggatttttttttttgagacggggtctcactgtgttgcccaggctggagtgcagtagcacgatctcggctcactgcaaccctcacctcccaggttcaagtgattctcctgcctcagcctcccgagtagctggggctacaggcatgagccaccacgctggctaatttttgtatttttagtagagacacggtttcaccatgttggccagactggtcttgaactcttgaccacccrccttggcctcccaaagtgctgtgattagcggcatgagccactgcacctggccttaagtggatatattgtgaaaaggtaacctgaggctgtcaacccaaaagatacagaaggatatacaatgaaaggtttctttcttaagtctgccctgagcatgggatagctggtcctgttgttaaaatgttaggctgggtgcagtgactcatgcctgtaatcccagcacttcggtaggctgagacgggaggattgcttgtgctgaagagttccagaccagcctgggcaacatagtgagaccccttctctaaaattaaaaaaaaaaaaaaagctgggcgtggtgatgcgtgcctgtagtcccagctactcttgaggctgagatgggaggactgtttgagtccgggagattgaggcagcaatgaactgtgatcatatcactgcagtccagcctggatgacacagcaacattctgtcccccctccaaaaaaaaaatgtgttaacttacttccctagatgcctcattatccatcctgctcttctgcaccctccttgggaacccccagacctccccagatccagcagctagaggccaggcacaggtgtgttccagctttccagatgggacagtgtcccctgccaggctggttgtcaaatattttgcataagcacctcttcctggccccagccactctaggaagcatgcaaagtgagtgtctgcatgtctctgtgtctctctcatctcttgaacctcattgttctctgcttctgtcgccatctgtctcttgccaccactctcttgtctgtccttgcactaatcaagcgaagatatttattgagcatctactgtgtgccaggcactattgtaggtaggcactgaacaaaacaacaccaccacctccagccatcatgggaagtcctttctcatcttccagacccagttctgtctgtcattagagctgtttctgctcctcctggtgaccctaaatttctcctctcaggctctctggctctctccggcatgatccaggccagaaggggacccagtacccctccttctgtcttcccatctcctgacagaaagcatccctggtcacttcactgtgccacccccagccccaggaccgctaccccttttctgtttacggctcagacatcctttccctagatttatctggggcaaggcagcatgcttctaaaggaaacttttatgggaattctgttcttgaggatgcaaactcatcatttagtgcccccttttccatccaggcctggatccttcctttgttccactttttttttttttttttttgagacagggatcttactctgttgcccaggctggagtgcagtggtgcaatcatagctcamtgcagcctggaactcctgggctcaaccaactctcctgcctcagcctcctgagtagctggactataggtgtgagccactgagcatggcctgttccacatttcttgagcacctgctgcatgccaggctcagcaaaacgaggaggaggagcccgggggactgttcattccatgattcattcattcattacttttcagtcattcattaattgctcctttcactctattgtttattcactcatcctccagtcaattaaacatgtactgagcccgtgctctgtacggagtgggggtgtgttcacagaaatgaccaggacagaacatgattcctgcctcacagagctcgaacgttatctgacaaggatggcccagaatgctcggggctgggatggaggaagtccaggcagaaaggtcagggcccggatgggagacgtgcagccgctgtgggagaggcagcatttgtcccaggcttgtggtgggtgaggtgtggwcacagagggattgagacggactaatctctgcaccttcccaccatcccagtcatttatttgtctagggacacatttcccaccctgtgggaggagtgggaggagtgggaggagtttccacatccgccaagggggcagagccatacagagctggggactggggccctggggccctgggggtcttagacctggcttcacccctgaatccgtgacattcagggcaagtcacttagagcttcagcttgcctggcccctcacctggaacctgtgtgtgaggtgctgttctttttttttttttttttttttttgagatggagtctcactctgtcacccaggcaggagtgtagtggcgcgatctcgcctcactgcaacctctgcctccagggttcaagctattctcctgcttcagcctcctgagtactgggatcacaggaaagagccaccatgtccaactaatttttgtatttttggtagagacagggttttgccatgttggccaggctggtctcaaactcctgacttcaagtgatccacctgcctcggctccccaaagtgctgggattacaggcgtgagccaccgcgccggccgctaggtgctgttcttatctgcgttttgcatgtgaggctcagaggggaaaactgacttgcccagagtcatggccaggaagtgccacagcctagatttgaaccctgttgctttcttttcttttcttttttttaaagacagggtcttgctttgttgcccaggctggagtgcagtggtgcgatcactgctcactgcagcctcaatctcctgggctcaaacaatcctcctgcctcagccttctgagtagctgggactaaaagcatgtgccaccttgctcggctaatttttcattctttttttgtagagatgaagtctcactatattgcccagggtggtttcaaactcctgggctcaagcaatcctcctactttggcctccccaaagtgctcggattacaggcgtgagccatcgtgcccggcctactctgttgttctttcaccctcatggagactcagggtcttcctcatctctaggactgatgcttgacagtttggctgctgaaggcctggaaagattgatttcagctcaatttcagaggcattttatctttcctggctcctaagctaagttgggcaggaggcagtcagtgcttcgcttgcttgtctcaggcccttcctgttccttctctctggttctgtctctgcaactgtctcctatacactctgtctctttgcttccatctatccatctatttctgtatctctgtttcctgctccctctctgtttttctctctgtttttctctccctccatctgcacctctctaaccctgtcttttctgcctctgtctttcacagatactgtacttttgtttctcccatcttttttctctctgccactgtgtttcttgcattcattcatttaacaaatataagtcgagcgtgtactgtatgccaagccctttttctaagcattggggacacatctatgaacaaaacagacaaaaatccctgccctcatggaaatgatatatcctagcatgggagacagccaagataaataagtaacacatagcacgtgttagattgcgttaagtgctaaggagaaaattaaagaagggaagaaagccagaaagtgttggggagtggtcaggagggacctcacgaagaaggtgatctttgagtagatgttgggggaaggagcattcccagcagagggaacggctagtgccaagggcctgaggcttgctcaaggcacagcgagaagggcagtacagttaccacagagtgagggggaagagtgcaaggagaataagagtttggaaaggtgggggtgtggggcctggtaggtcagaaaggcctctgagattggccgagtgcaggagctcactcccatcccagcactttgggaggccaaggcgggtggatcacttgaggtcaggagttcgagaccagcctggccaacatggcgaaaactcgtctctactaaaaatacaaaaattagccaggcctggtggtgggcgcctgtaatcccagctagttgggaggctgaggccggagaatcgcttgaacctggggggtggaggttgtagtgagccgagatcacgccactgcactccagcctgggcgatggagcgagactccatctcaaaaaaaaaaaaaaaaaaaaaggactctaaggactctcatggagaccctgggaggatctctaaggactctcatggagaccctgggaggatagtctcattctctctctctccctgggggagacagatagcaacaggacagggatgcatgggagcccatgtgggatgccccagccccatccaccaggcctcttgggcactttgccttgcactgtgggcaggaggccagactgcccggggcccatggtcccagccggctccagagtggtacggcctgggtccagcctggtcagttcagtcaggccaagggcctcgctctgcctgcaggagtgcccacttcagcttctctgcgactctgctgtcatctctccccacactctgctctcttccctctctccaactctgcggccccctggtctgtctgtcgtctgtggggctgtcttttcctggtggcatttgccactcctctgcctgtctctctctgggctgtccctgaccggactcctcctgtcactttccctctctctgcctcctctctttcgtcgtctgctgctccctgagtttctttctggctctgccttgctccatctcttttctcgtctttttttattctctctctcgctctctttctggtgtctcctctcactttctcgtttgttttgttttgtttttgtccctaggtatgtctgtctttacttctctgttatctttctctctggacttgcctttttttctctccgtctatatctctttctttctaagtgcctgtctctgcctctccctttctcttcctctgtctgtctctctctctgcccttcttcagccccgtccctgcgtccctggctttgccccactaattcctccctctctcttacatattttccacgcccttcttcccctacccagcccagtgccctcacagtcctactgccagcgccgcaccccccaacccrgggcctttccccagcccttatctccccatccccaggaaccaagaaaaccagttacgggcccagcaatggatgcaaaagctacatgaccaacttgagctgcagcacttcctccgagactgccacgaggtaggaactccaggtgtgctggggacggagacatcccctttagtcgggagggaagtgcttctcggccgaggtgggggtggggacgccccgtctaagtgggtcgcggagcgatgctcgctctaagccgccagggggcgcgcggagccgggtctcagtgcgcatgctccgcaagtccctgcccgcccacgccgactccgggaaacgaaggaggggccccgggcgcccctggcaaccgcgcgtgtccgcgcctacgggtcccgcggggacgcgcgctgatctcacctttctctcctgagatttgtgagaatcgctctaccccaggagaggggcggggcgggcggtggggataagggccgagggccgtgggggggccagcggccctgcgccctcctgcagccagcgatggctctgaaccaagccctcgcccctttaaaggtgttcagtaatcaagccccttcccttagggatgatctgcacacattagggacgatctcccctaatccgagatggtccaggcccccttccttattagtgacggttcaggagacctgctgtcttcccctccttcccttgcattccatagaaacgattctagactttggccacattagagatggcctagtaaacattttcctaaaccctaaacagagmtaggcctggccctgagcccctccatctgtgtgacccaggatcatcccctcctccatcatcaccccgtacctaagtttcttccaaccaaagctggttcaggaaccaggtctaacccctaaacccctcagcctcaattaaagacgattcgaccctcccccctatgttgaacacccatgggagattgttctctccgcacacggaataaacaagggcctccataccgtgcccccctcccccataactggggtaggccgggacttgagccactggaggaaccccctgttccccctcgcccccactggagattgtgagatgttccaggtcgccctcccatatcccctgtccacatgtggtggccaggagcccgagcttcttcccattagagatggttcaggaggcccccacccagcccctcaccataatccccactcccttagtgaggcagtccaagccccaggcgctccctcccggcattagatttggtccaggagcaccccccatccctcatgagattgttctggatcaggcagcaatcatctgagatggcgcagaagccccccacccgaagccttggggcgagtggtggttcctcctgcacccccacctggggccccgcaaagaggcgggcagggaggcaggcaggggsygcacgcgggcgggcgcgcggccgccgcgcgggggcgagggagggggcgcgcggccgccggagcctcagccttcgccgccgctgccgctgccgtcgcagttgaggggcgagcacccgcccgcccgctgcagggacgccccgccaacgccactgtcacttcaggtgtcgggggcgcccaggggagggggttggcgcgcacccccnnnnnnnnnnnnnnnnnnnnnnnnnnnnnnnnnnnnnnnnnnnnnnnnnnnnnnnnnnnnnnnnnnnnnnnnnnnnnnnnnnnnnnnnnnnnnnnnnnnnnntccccccccttggaggggcaaggacgccgggagctgtccgcggtgctggcgcgggcgggactgaggggccggcccccaagggaggggagcgaagcggggggacttctaagaccacttctagggtaatctggatttgccctaagggttcagggcgtctcagcctttcgagggggggctcttctccgggtaatggggcatctaagatttgccctggggttgggggtttctcaaccttttggggggtttctttcttgttttgggaggatctgtatcagccttggatgatggaggtgaatcacttttggggggctctgccttggaagatgaggggccttggattttctctgggtctagggggctctgactttgtggggcttttcctgggttgttggatagtctggttttgccctccatcatgaaggaatcacttttgagggggctttactttgaggatggggtaccatctctttaagggctctgctttcactgcgggctgtggttgccgttggactcttccctgcacgtcgggaacctgtgaattgagttggggggttcagcactggacttggttctagtgtgtgtatgaaggagtgtgatgctgtcctggacccctggggagcacatgctcaggggacatgggmtggggtttggccggctggggatctgggatttgtccttggctatgactgcatttgcctcccgggaccgcggagstggagtccagtgtttgttttttkttttttttttttttttttttttgcaggagggaggagggaggatcttgtgactggagtggggaggagaaaggggaggagcaaactgtttcaggtgccaggtttggtcatgagtggggaagttctggcttggaggataagtctggttttttactggagggggttgggggaggctcaaaaagcagcctgtgattgatcctctctagtgccgtgagaggggcccactcttggtgcttgcgttttggatgactggttttgttggtgggtaggaggactagaactggctttagttgtaggggtgggggtgctggccgggcttgggaggtccgatctgatccacgatggagagtctgtggctagattttggggtagactggtttggagagccagaacacagctttgtttttcacatttggctggggttggctttggttgagggctagaactggtcatggtttggggatctatggtcttagagtcccagggctagaaytggggagccctgtgggctcattaggggtgctagatctcgattatggaggatgggtctactccagattagagggttagtttagagagagctagagttggctttaattgggaggttgtttggggggtttatctggccatactggaggaactggggctagatatgggggcttcatttgatacccttgggaatgggttgaggctcttgaattggtccttattggggggtggctaagattgaatgaagtgtctaagtgttgctatgggaggggtggtcctggggatgaattgggagttagctaaattgggttggagagcttgttttgggggggtgatctgtccccaagtctaagaggctgactggccctgccttgggggcttgtggggagttgaggagggcttccctcaggacaggggacaggggagcaaaggattgggcattctggggacccttccatccatcctctatccaggaaagagcttgagctgcacccacccccaatataaaggcctcacttgcaaaggttttttcatcctttcctattccttccacccatacaccctagcagcccaggccctgaacctgggacttcctgaagggatggggggctgtggcaggttgaggggaccagctgagccctcctgccctgttctgcacagctggatggctggatccatgagaagatgctgatggcgcgggatrgcacgcgggaggacaaccacaagctgcataagagatggctccggcaccaggcattcatggccgagctggctcagaataaggagtggctggagaagatcgagcgggtgaggaagctgatggcccctctgcctgtgccaggtgcaggaggcctccagggagcccacgtctcacctgctgcacccgctgctgccatcctgctggtcttacacctctggactgactcaaatcagctccagatctgctcctagctatgtggctttgagtgattcatgtaacatctttgagcctcaatttgctcatctgtaaagtggccagcatctcttctgaatggtgcctgtatcctactgtttgttaaatatttcacttcttaatataacctcctctaccaggttccttccataccatttggggcatttaagatggaaggttggggagatgggctgggacagaccctgggaagcccagggttaaagtaaactttggattcttagagccctgggttctaactgtgtctatgcctgttaccagctgtggggccttaggtaattgtgttaacctcttggagcctcagtttgctgttctataaaattaaggaaataataaatatagctacttcctgggctctgtgcacataaagtacttaacacaaggccacgcacctaagagctgtaattactgtggtcttgttacttttaatacttaatgttacctaagtagctctgggccactaagaaccttgacttcagtcttggagggactgaggtagatatttgctctaagcctcaaccctcagaacttccccctcctctggctgaacccctagacctgtagccctggatatacacacttttctgactcacacagagacacccatgttggccttaaacccttaaatggtcattgatgtttcataaatggtggcatatggcgaaggcagtcttcttgactttgagtttaatggaagttcattctctccctgcctctctggctccctctatctttctttcctgtctgtctatccctctatccttgtctttcttacggtcctctccccatgtttctgattttctgtgcctgtctctctgttgatcactctgtgactgtttgtctctccctgactccttcccatgtctctgtgtccatctgtctctccctgtatctttctgtctccctcccctcacttctgtctgtctgtctctctcttcttgtctctcttccttggttccttccatttctgggcctatctctgcatccacccctcatgtctctctctccctatgtgtctcccactccctgcctctgattctcttttcacatccttccctgtgtcctgtcactctcccacacttctctgattctccccaccatctatctatcttctccatctcctgccatccacccacttggggcaggagggccagcaactgatgcaggagaagcccgaactggcggcctccrtgcggaagaagctgggcgagatccgccagtgctgggcggagctggagagcaccacccaggccaaggcacggcagctctttgaggccagcaaagcagaccagctggtgcagagctttgctgagctggacaagaagctccttcacatggagagccagctgcaagacgtggaccctggaggagacctggccactgtcaacagtcagctcaagaagctgcaggtatggtcttcctggcccagatgagggctccctatgccacatgggggccaggtcagggtccaaccccactcaaggtatgtcaartggaggggatttaatacagggatttatttcaaacttgtagaagatgagaaagggaatattgaagyaatccagctagtaataactgttggaagcagccaccactccctaaggtatggagtacaaagggaaaaggaaggatctagagccacaaagcagtaggtaaatgactagcatgctaaaggtttcacaggaccctgacactcatttcctggatggagaaaccaaggctcaggggtatgggaatggctttgcatggaataacaatgacattcattgagcatttctctaccagtctctgggccaagcactcactgaactcatcccagccacttctggagattggtactgttattatcctgttttaccaatggggaaactgaggcacagaaagtaaggcacctggcccaaggacacacagctaaccagtgtctcctttatgaaacagggcactcttagagaacagacgcagcgtctgctttgtatctgctcccagcttggcagctccatgcttggtacacagcagttcacgtggaatgaccagaggtgaacgtagccattgcttctcacctcccagggagtaatggctcctgcctttgattttctttttttgttgctgttgttgatgttgttgtttgtttttttcttcaagatagttactcactctgtcgcccaagctggagtacagtggcttgatctcagtccattgcagcctcaaactcttgggctcaagtgattctcccacttcagccttccaagtagctgagaccacaagygcataccaccacgtctggataatctttttaaattttttatagagacagggtctcaccatattgcctagggtagtctcaaactcttgggctcaagcaaccctcccgcctcagccttccaaagtgcttggattacaggtgtgagccatggtatctggcccacgtgactcctgcttttacctgtcaggaacaatgcctgactgactgatgggaaactgaggttccaggaggtgagaggtgaacttacttgtccagagtagcaaatagcaaagcctggatttcagtccagtgcccttgactcttcactcctcctttttgatatatttcctatgtagttatatagtgcttggcatagtgtatggcaaaaaaaaaaaaaaaggctagtaagaaatacataatgacactgattagtatgtattcattcatctctgtggcaaataattattaggtaccagctgggtgtggtggctcacgcctgtaaccccagcacttcgggaggccgaggcgggcggatcacgaggtcaacagttcgagaccagcctgaccaatgtggtcaaacctcatctctactaaaaacacacacaaaaaaattagctgggcatggtggtgcacgcctgtaatcctagctactcaggaggctgtaatcccagctactcaggaggctgaggcaggagaatcacttgaacggggaggcagaggttgcagtgagctgagattgcatcattgcactccagcctgggagacagagcgagactccatctcaaaaaataaaaaaataaaaaaaataattaggtacctactatgtgcccggcacttttctgggtgttgggatatagcagtgggcaaaatggatgaaaagttactgccttcacggtgatcccattctggttgggggaacaggcaaaagaacaaaaagacaaacagatctgaatgtgatggccaatggggtcagttcgttctttttccctccgctcccctccccttcccctctcttttcttttcccctcccttccttccttccttccttgcttccttcgttggagtcttgctctgtcacccaggctggagtgtggtggtgcaatgtctgctcactgcaacctctacctcccaggttcaagcagttctcctgcctcagcctcctgagtagctgggattacaggcatgtgccaccacacccagctaatttttttatttttagtagagatggggtttcaccatgttggccaggctggtctcgaactcctgaccacaggtgattcacccgccttggcctcccaaagtactaggattacaggtgtgagccactgtgcccggccaatgaggtcactacttaatatagaatagcagttctcaaatgtctgggtctccaggaccccccttacactcttaaaccgcattgagatccttagaaagctttgtctgtgtgggttagacctattgacattcactgtattaaaaatgaaaatcgaggccaggcataatggctcatgcctgtatcccagcactttgggaggccgaggcaggaggattgcttgagcctaggagtttgagactagcctgggtaacggagcaacagcctgtctctattttattttatttagttatttgagccaggatctcgctctgttagcaggctggactgcagtggtgcratcacggctcactgcagcctcaacctctggggctcaagtgatgctcctccctcagtcccgcaagtagctgggactacggacccacaccaccatgcctgattgattttttttttaagaaacagaatctcactatgttggccagtctttatctctatttattgaactaaaaaaaaaaactaaaacggagtctggctctgccacctaggctggagtgcagtggcttgatctcagctcactgcagcctctgcctcctgggttcaagcagttctcctgcctcagtctctggagtagctgrgattacaggcctgtgccaccaagcctggctaatttttgtatttttagtagagatggggtttcagcatgttgcccaggctggtctcgaactcgtggcctcaggtgatcggcctgccttggcctcccaaagtgctgggattacaggcatgagccatggcatccagactgtagttctctttcatgtctagaatagaagagagctagcttctcccatccgtgtctgtattcaatccatttcactagcacaggtcatcaggtctctgaaaaacactgctgcatgctggagagagaatgagaatggtgaaggcaaataacatcttagtatttttataaaaatagttgtaaccttgcagatgccttgaaaagatctcagggatcccccaggggttccttggccacagtttgagaactgctgatgtacacaatgtgctgggcactgttaactcctctctcctccccaacagccccatgagggaggtcctgttattatccccacccagcagaaaaccacagcacagaaaggatctgtggctcacagaggtcacatggctaccaagtggctattcaataccacctttagtccctccctgagcctctgtcctccctcttaaataggactctatcatcagtgcaggtctcccagggccaggtggggatgtgcacagaaaggagccacttagcacagtgcccaggatgtggtaagcctgcaagaaaggggcatctgactgtcagggtcccagccagaaacagaagcaggctcacctgcagaaaacttgagtttcttgacaaaggtgtgagtggagaacggggaagctgcaggaagcatatagggctgtgggactcatggaggggagcttttgctcctccctagccagagaaggtagagaaggaaaagttattggaacttggaaggggagagttgccagacaggagctggcactcttagtcaagaacggcagccatggccagacgcagtggctcaygcctgtaatcccagcactttgggaggccaaggcgggtggttcacttgagatcaggaattcaagaccaacctgggcaacatggcaaaaccccgtctctactaaaaatacaaaaattagccgaacgtggtggcacatgcctgtaatcccagctactcgggaggctggggcatgagaatcgcttgaacttgagaggcggaggttgcagtgaggcaagattgcaccactgcactccagcctgggtgacagagtgagactctgtctcaaaaaaaaaaaaaaagagaaagaaagaaagaacggcagccagaccatggcaccatagcagggaagagctggggagataataccccagactcactttcctctgggcttccctttgtcagccagggctggcttcatgggtgtttgcccgtgcagtgacacagggctccatgcttggtttaatgccctactattgatgtcttgaatttttttgtttttgaggcagtttctacctctgtcacccaggctgaagtgcaatggcgtgatcatggctcactgcagccttgaactcctggactcaagtgaacctgtcacctcagcctcctgagtagctgggactacaagcgtgtgccaccacgcccagataatttttgtagtattttatagagacgggggcctcactgtgttgcccaggctggtctcaaactcctggcctcaagtgatcctcctacgttagtctcccaaagtgctgggattacaggggtgaagcactgcccctggataaaattcttaataaatatttgaacaagggaccttgtgttttcattttgcactgaaaagtataagccatgtttgaggccaacccacatggaagccagaggacaggagggctggtccatgcaggtcagtcctgcacagggcagggtgaagaagcttggactatgggtctcaagatcccgggctgaagcatccatccacctcggcctcccaaagtgctgggatyacaggcgtgagccactgccccagcctattgctaggattcataattatcttgcagtgattactaattcttccccagcagtgttttgcagtggctgaaggcacagacttgggactccagcaggtctggttctgagtcacagctctcccacttgctgccttcgtctctccctctgagccttggatgccttctccttgcaatgggaaggacctcaatgctcaccccctggtggatagcaggagtgtgggaagcagcagagcatctcagtgaagggcatggatgctggcgctgggctgcctgggtcaagccctggctctgtgccttatcacctggatagcccaaggaggttacttttctctccatgcttcagtttctttttctttttttaagagggagtctcactctgttgcccaggctggagtgcagtggcaggacctcggctcactgcaacctccgcctcctggcttcaagtgattctcctgcctcagcgtcctcctgagtagctgggattacaggcacctgccaccacgcctggctaatttttgtatttttagtagagayggggtttcaccatgttggccaggctggtctcaaactcctgacctcaagtgatccacccacctccgcctcccaaagtgctgggattacaggcatgagccaccgcgcctggctgtgcctcattttcttcttcagtaaaatgggcataatgatatttctgacctcataaggacattgtgaaggtgaaaagacataatgcwttaagtggtttcagaactgctgacccaacaaatctaagattcagtatttattcacaggtctttaattttttttttttttagaccaagttttgttcttgtcacccaggctggagcgcagtggcacaatctcggctcactgcaaccctctgcctcctgggttcaagtgattctcctgcctcagcctcccgagtagctgggactataggcacccgccaccatacccggctaatttttgtatttttagtagagatggggtttcgccatgttgtccaggctggtcccaaactcctgacctcaagtgatccgcccgcctcggcctcccaaagtgctgggataataggcatgaaccaccgtgcctggccagtctttaattttaactgtcataaaactgagagcatatcaccatcactctactgttttcaaaagctagttgtttcaccttccctttggttgttacttatgtgatacacggttacttcatttgtttttgttcatattccatttggggcatttacccctctccatgctgctttttaattttaatttatttttattttttgatagatggggtctcactatgttacccaggctggtcacaaactcctgggctcaaacagtcctcctgccttagcccctcaaagtgctgggattattcgcgtgagccactgcacctggccccaaaacacattttaaaaaagcaacatggatgattgggcacagtggctcatgcctgtaatcccagcactttgtgaggccaaggcaggaggatcgcttgarcccaggtgttccagaccagcctgggcaacatagcgagattcacatgcctgtgttcccagctactcagaaggctgaagtgggaggatcacttgagcccaggaggttgaagctgcagtgagctgtgatcgtgtcactgcactccaatctggtcgacagagtgagacccccatctcaaaaaaaaaaaaaaaaaaaaaaaagaaaagtaatttggaggtggtaaatgaaatatttatatagtgttaaaagttagaaccatctttagctcacttgcttttgccaaattgcctgcccaggtccttctgtggctgctcactctctccccagcagtacacatgagctcctgtttcctctcgtccttgccaacacttggttttgtcagacattttagatctttctcagtccgatggctgggaagtggtatctcactgcagtgtgtgtatttgtatttttttccaatgctactggcgagcttgaccatctttgaccttcttttgtactatttaggttttagaggaaggagttggggcctcctgctttagccagagtacagagttagctcttccctccctgtagggggttcagtctcaaccaagcccagcaaaccatgagatgggggtccccattgttcaagggaggggctgaagcccagaggagacaagggagtggccctggggtcacacagtgatgggtgccagaggcaggctccagcacgagactcctgggcccttttcccagcagagggagcccgaggcaggaagtgactgtgtgggccagggcacccagacggagcccagctgcccctcaggagctgctactggggaagggacctgccaaggccctgctgtcccctggggcatacacaggagaggggttggctgccatccagcctggcacgtttcctggctgtcccatccacccttagggcactgggtccaggctgggctgagggaggtactgnnnnnnnnnnnnnnnnnnnnnnnnnnnnnnnnnnnnnnnnnnnnnnnnnnnnnnnnnnnnnnnnnnnnnnnnnnnnnnnnnnnnnnnnnnnnnnnnnnnnnnnnnnnnnnnnnnnnnnnnnnnnnnnnnnnnnnnnnnnnnnnnnnnnnnnnnnnnnnnnnnnnnnnnnnnnnnnnnnnnnnnnnnnnnnnnnnnnnnnnnnnnnnnnnnnnnnnnnnnnnnnnnnnnnnnnnnnnnnnnnnnnnnnnnnnnnnnnnnnnnnnnnnnnnnnnnnnnnnnnnnnnnnnnnnnnnnnnnnnnnnnnnnnnnnnnnnnnnnnnnnnnnnnnnnnnnnnnnnnnnnnnnnnnnnnnnnnnnnnnnnnnnnnnnnnnnnnnnnnnnnnnnnnnnnnnnnnnnnnnnnnnnnnnnnnnnnnnnnnnnnnnnnnnnnnnnnnnnnnnnnnnnnnnnnnnnnnnnnnnnnnnnnnnnnnnnnnnnnnnnnnnnnnnnnnnnnnnnnnnnnnnnnnnnnnnnnnnnnnnnnnnnnnnnnnnnnnnnnnnnnnnnnnnnnnnnnnnnnnnnnnnnnnnnnnnnnnnnnnnnnnnnnnnnnnnnnnnnnnnnnnnnnnnnnnnnnnnnnnnnnnnnnnnnnnnnnnnnnnnnnnnnnnnnnnnnnnnnnnnnnnnnnnnnnnnnnnnnnnnnnnnnnnnnnnnnnnnnnnnnnnnnnnnnnnnnnnnnnnnnnnnnnnnnnnnnnnnnnnnnnnnnnnnnnnnnnnnnnnnnnnnnnnnnnnnnnnnnnnnnnnnnnnnnnnnnnnnnnnnnnnnnnnnnnnnnnnnnnnnnnnnnnnnnnnnnnnnnnnnnnnnnnnnnnnnnnnnnnnnnnnnnnnnnnnnnnnnnnnnnnnnnnnnnnnnnnnnnnnnnnnnnnnnnnnnnnnnnnnnnnnnnnnnnnnnnnnnnnnnnnnnnnnnnnnnnnnnnnnnnnnnnnnnnnnnnnnnnnnnnnnnnnnnnnnnnnnnnnnnnnnnnnnnnnnnnnnnnnnnnnnnnnnnnnnnnnnnnnnnnnnnnnnnnnnnnnnnnnnnnnnnnnnnnnnnnnnnnnnnnnnnnnnnnnnnnnnnnnnnnnnnnnnnnnnnnnnnnnnnnnnnnnnnnnnnnnnnnnnnnnnnnnnnnnnnnnnnnnnnnnnnnnnnnnnnnnnnnnnnnnnnnnnnnnnnnnnnnnnnnnnnnnnnnnnnnnnnnnnnnnnnnnnnnnnnnnnnnnnnnnnnnnnnnnnnnnnnnnnnnnnnnnnnnnnnnnnnnnnnnnnnnnnnnnnnnnnnnnnnnnnnnnnnnnnnnnnnnnnnnnnnnnnnnnnnnnnnnnnnnnnnnnnnnnnnnnnnnnnnnnnnnnnnnnnnnnnnnnnnnnnnnnnnnnnnnnnnnnnnnnnnnnnnnnnnnnnnnnnnnnnnnnnnnnnnnnnnnnnnnnnnnnnnnnnnnnnnnnnnnnnnnnnnnnnnnnnnnnnnnnnnnnnnnnnnnnnnnnnnnnnnnnnnnnnnnnnnnnnnnnnnnnnnnnnnnnnnnnnnnnnnnnnnnnnnnnnnnnnnnnnnnnnnnnnnnnnnnnnnnnnnnnnnnnnnnnnnnnnnnnnnnnnnnnnnnnnnnnnnnnnnnnnnnnnnnnnnnnnnnnnnnnnnnnnnnnnnnnnnnnnnnnnnnnnnnnnnnnnnnnnnnnnnnnnnnnnnnnnnnnnnnnnnnnnnnnnnnnnnnnnnnnnnnnnnnnnnnnnnnnnnnnnnnnnnnnnnnnnnnnnnnnnnnnnnnnnnnnnnnnnnnnnnnnnnnnnnnnnnnnnnnnnnnnnnnnnnnnnnnnnnnnnnnnnnnnnnnnnnnnnnnnnnnnnnnnnnnnnnnnnnnnnnnnnnnnnnnnnnnnnnnnnnnnnnnnnnnnnnnnnnnnnnnnnnnnnnnnnnnnnnnnnnnnnnnnnnnnnnnnnnnnnnnnnnnnnnnnnnnnnnnnnnnnnnnnnnnnnnnnnnnnnnnnnnnnnnnnnnnnnnnnnnnnnnnnnnnnnnnnnnnnnnnnnnnnnnnnnnnnnnnnnnnnnnnnnnnnnnnnnnnnnnnnnnnnnnnnnnnnnnnnnnnnnnnnnnnnnnnnnnnnnnnnnnnnnnnnnnnnnnnnnnnnnnnnnnnnnnnnnnnnnnnnnnnnnnnnnnnnnnnnnnnnnnnnnnnnnnnnnnnnnnnnnnnnnnnnnnnnnnnnnnnnnnnnnnnnnnnnnnnnnnnnnnnnnnnnnnnnnnnnnnnnnnnnnnnnnnnnnnnnnnnnnnnnnnnnnnnnnnnnnnnnnnnnnnnnnnnnnnnnnnnnnnnnnnnnnnnnnnnnnnnnnnnnnnnnnnnnnnnnnnnnnnnnnnnnnnnnnnnnnnnnnnnnnnnnnnnnnnnnnnnnnnnnnnnnnnnnnnnnnnnnnnnnnnnnnnnnnnnnnnnnnnnnnnnnnnnnnnnnnnnnnnnnnnnnnnnnnnnnnnnnnnnnnnnnnnnnnnnnnnnnnnnnnnnnnnnnnnnnnnnnnnnnnnnnnnnnnnnnnnnnnnnnnnnnnnnnnnnnnnnnnnnnnnnnnnnnnnnnnnnnnnnnnnnnnnnnnnnnnnnnnnnnnnnnnnnnnnnnnnnnnnnnnnnnnnnnnnnnnnnnnnnnnnnnnnnnnnnnnnnnnnnnnnnnnnnnnnnnnnnnnnnnnnnnnnnnnnnnnnnnnnnnnnnnnnnnnnnnnnnnnnnnnnnnnnnnnnnnnnnnnnnnnnnnnnnnnnnnnnnnnnnnnnnnnnnnnnnnnnnnnnnnnnnnnnnnnnnnnnnnnnnnnnnnnnnnnnnnnnnnnnnnnnnnnnnnnnnnnnnnnnnnnnnnnnnnnnnnnnnnnnnnnnnnnnnnnnnnnnnnnnnnnnnnnnnnnnnnnnnnnnnnnnnnnnnnnnnnnnnnnnnnnnnnnnnnnnnnnnnnnnnnnnnnnnnnnnnnnnnnnnnnnnnnnnnnnnnnnnnnnnnnnnnnnnnnnnnnnnnnnnnnnnnnnnnnnnnnnnnnnnnnnnnnnnnnnnnnnnnnnnnnnnnnnnnnnnnnnnnnnnnnnnnnnnnnnnnnnnnnnnnnnnnnnnnnnnnnnnnnnnnnnnnnnnnnnnnnnnnnnnnnnnnnnnnnnnnnnnnnnnnnnnnnnnnnnnnnnnnnnnnnnnnnnnnnnnnnnnnnnnnnnnnnnnnnnnnnnnnnnnnnnnnnnnnnnnnnnnnnnnnnnnnnnnnnnnnnnnnnnnnnnnnnnnnnnnnnnnnnnnnnnnnnnnnnnnnnnnnnnnnnnnnnnnnnnnnnnnnnnnnnnnnnnnnnnnnnnnnnnnnnnnnnnnnnnnnnnnnnnnnnnnnnnnnnnnnnnnnnnnnnnnnnnnnnnnnnnnnnnnnnnnnnnnnnnnnnnnnnnnnnnnnnnnnnnnnnnnnnnnnnnnnnnnnnnnnnnnnnnnnnnnnnnnnnnnnnnnnnnnnnnnnnnnnnnnnnnnnnnnnnnnnnnnnnnnnnnnnnnnnnnnnnnnnnnnnnnnnnnnnnnnnnnnnnnnnnnnnnnnnnnnnnnnnnnnnnnnnnnnnnnnnnnnnnnnnnnnnnnnnnnnnnnnnnnnnnnnnnnnnnnnnnnnnnnnnnnnnnnnnnnnnnnnnnnnnnnnnnnnnnnnnnnnnnnnnnnnnnnnnnnnnnnnnnnnnnnnnnnnnnnnnnnnnnnnnnnnnnnnnnnnnnnnnnnnnnnnnnnnnnnnnnnnnnnnnnnnnnnnnnnnnnnnnnnnnnnnnnnnnnnnnnnnnnnnnnnnnnnnnnnnnnnnnnnnnnnnnnnnnnnnnnnnnnnnnnnnnnnnnnnnnnnnnnnnnnnnnnnnnnnnnnnnnnnnnnnnnnnnnnnnnnnnnnnnnnnnnnnnnnnnnnnnnnnnnnnnnnnnnnnnnnnnnnnnnnnnnnnnnnnnnnnnnnnnnnnnnnnnnnnnnnnnnnnnnnnnnnnnnnnnnnnnnnnnnnnnnnnngattaagtgcaagggcaggcagatcacaatgggtcaggagatcgagaccatcctggctaacatggtgaaaccccatctctactaaaaatacaaaaaaaattagtcaggcgtggtggtgggcacctgtagtcccagctacttgggaggctgaggcaggagaatgccgtgaacccaggaggcagagcttggagcttgcagtgagccaagatagcaccattgcactccagcctgggcgaaagagcgagactctgcctcaaaaaaaaaaaaaaaaaaaatcaaaattaaccgggcgtggtgatgtgtgcctgtgatcccagctactcgggaggcggaggcaggagaatcacttgaactgaggaggcagaggttgcagtgagccgagatcatgccattgcactccagcctgggcaaaaagagcgaaactccatctcaaaaaaaaaaaaaaaagaaagaaagaaagaaaagaaaaaagaaaaggaagtcttgttttaatttctattttccagcttattaataagactgagcatcttttcatatgcttgttttgtctgttgcctgttcacatctgatgcccatttctctttttgggcagtcctttttttttgctgatgtcattcatgtatgcattgaacaaatcataactggaggcctattgtgtaccaaaaattgttctaggctttcaagaatatagcagtgagtgtgacacagcccctcccatcatgtgggtcacattctggaagcaagggaccaataaaaatacaaaagtacctgagtgcagtggctcacacctgtaatcccagcactttggaaggccaacgtgagaatagtttgagtccaggagttcaagaccagcctgggcaacatagcaagaccccatctttatgacaaatttcaaaaatgagctgggcatggtggtgtgtgcttgtagtcctagctacttgggaggctgaggcaagaggatcccttgagcccaggagttcaaggctgcagagagttattatcttactactgcatgccaacctggatgacagagcaagaccctatcaaaaaacaaaacacacacacacaaatcaagagagttgtctgatggtggtaagcactgtgaagacgaagcaggatggagggaaattctttgattgttaaactagttccttgcactgatacatatcaatttttacagtttgtcatttgccttctaactctatgaaattttggttgatgcagaagtattttttaattattttttaattatactttaaattctagggtacatgtgcacaaygtgcaggtttgttacataggaattcatgtgccatgttggtgtgctgcacccattaactcgtcatttacattaggtatttctcttaatgatatccctcccccctccccccaccccatgacaggccccggtgtgtgatgttccctgccctgtgtccaagtgttctcattgttcagctcccacctatgagtgagaacgtgtggtgtttggttttctgtccttgcgatagtttgctcagaatgatggtttccagcttcacccatgtccctacaaaggacatgaactcatccttctttatggctgcatagtattccatggtgtatatgtgccacattttcttaatccagtctatcattgatggacatttgggttggttgcaagtctttgctaatgtgaatagtgccacaataaacatacgtgtgcatgtgtctttatagtagcatgatttataatcctttgggtatatacccagtaatgggatcactgggtcaaatggtatttctagttctagatccttgaggaatcgccacactgtcttccccaatggttgaaccagtttacattcccaccaacagtgtaaaagtgttcctgtttctccacatcctctccagcatctgttgtttcctgactttttaatgatcgctattctaactggtgtgagatgatatctcattgtggttttgatttgcatttatctgatgaccagtgatggtgagcattttttcatatgtctgttggctgatgcagaagtatttttatgtgatcaaattataaatctttccctttatgttttttatgcttggaaagatttttctccatcccaacattataaaagcatttgcccaggttttcttttagtgccttatggatttacttactctgtttaggtctttaatccatctggaattgttttcagtacaaacagcaaggaaaggatccagctaaattggttagccattggcccatgaccattcattaaataatccatctttcccttggggatttgaattggcacctatgaaacacatgaattttcctgtgtatttgggtctgcttttgcactttctgtctattcctaagacacagcagccatccaaattactatagctttgtatttatttttgataatttcttactatcaaatttttttatccggtaatcccagcactttgggaggccaagatgggcagatcacttgaggttatgagtttgagaccagcctgaccaacatggtgaaaccccatctctactaaaaatacaaaaaaaattagcaaggcrtggtgtcaggtgcctgtagtcccagctacttgggaggtcaaggcacaagaatcacttgaacctgggaggtggaggttgcagtgagctgaggttgcccactgcactccagcctggatgacacagcacccaggctgatttgttcatcctgaggtcaggagttcaagaccagcctggccaatatggtgaaaccccatctctacaaaaatacaaaaattagccgggcatgatggcrggtgcctgtaatcccagctactcaggaggctgaggcgggagaatcacttgaagccaggaggtgaaggttgcagtgagccaagattacgccattgcactccagcctgggcaacagagcgagactccatctcaaaaaaaaaaaaagcgttaacaaaaaattattactatatttgatggtaataattttggaaagttgactctttggacaaattctttaacttctcttggccttggtttcctcctctgtaaaacagggagactaccaatcttgaaggttgttctgggaattagtgaattaatggaccactttagttccggggtcaggtaagcctctttgagaaggtaatactccagctgaaatctgattgacaaggaagagcatgcctggcagaggaaacagcaaaggcaaaggctccgaggcagggactagcttagtgtgatgcaggttcatgcggagcgcatcgctcctggaggggactgaacaaggagagggtggaagggtgggccgcggtgaggggtctggctgtcaccataagggtactggagagccacagcaggatcaggagggcgggtggggcccattgaccctgcctctgtccccacagtccatggagtcgcaggtggaggagtggtaccgcgaggtgggagagctgcaggcgcagacggcggcgctgccgctggagccggcgagcaaggagctggtgggtgagcggcagaacgcggtgggcgagcgcctggtgcgcctgctcgagccgttgcaggagcgccgccgcttgctgctggcttccaaggagttgcaccaggtggcgcacgacctggacgacgagctggtgaggccagcgcaggggcctggggcggggcggggcggggcggtggggcggagaaggtgggcatggggcggggctgaagatggagacggctgagaccctcccactcatacgctgaaagacgcattcagccgttcactcattcattcattcacactcatttactcactttgaatcattcgttgatttattcatgaagtcactcatttatttattcactcatccatagtttgttctttcctccactcatttatttacttaactattcattcattcactcctctgttcctcattccatcactcaatttcctgatttgctcattcatttgttcactcagttgatcattctagccccagccctgtgtttggatgatagtggggccacaggggtggccaaggcagaccccattgtgccccagagggttcagagtccaacggggaaaacagacttgtccccagacagtgacaattcagggtggttaggaatatgataggaaacaagacctgtatgtgcaaaggccaacggtgtgagcctggcttaagtgcagacagcaagaaagagtatgtcaacagaggagactgagacaggtgtggkggtgcctgttgtcccagctacatgggaggctgaggtaggaggattatttgagcctggggattcgatcccatctcaaagaaaaaaaaaaaacaaaaaatggaggaggctgaatattcaactgggctcttaggcaaggaagggcctgggatgccgtgcaggtttaaagtttagttgcgatgcaggggttcttggatgcattctccccttgacctgcttcctgtgtcctctccaggcatgggttcaggagcggctgccactggccatgcagacagagcgaggcaacggtttgcaggcggtccagcagcacatcaaaaagaaccaggtgagcagagccaggtgagggagcgagttaggacatttggatacatgtgatagaaacagctgaaggtggttaaagccaaaacaatgaatgtattggcttttggaattaacaagactgtggacagcagatacagatgtatccaggtgcttccatatattttcatgactcttggctctattttttttttttttgagatggagccttgctttgttgcccaggctggagtttagtggcacaatctttgctcactgcaacctccacttcctgagttcaagcgattctcctgcctcagccatccaagtagctgggattacatgtgtgcaccaccacacctggctaatttttgtatttttagtagagatggacggcggggggtggggtgtttcaccaggttggccaggctgggctcgaactcctggcctcaagtgatccactcgcctcagcctcccaaagtgctgagattacaggtgtgagccaccgcgcccggcctgtttgtttttctgcatgagctttcttcttaggccagtcctcctctcctggtgataaaaggcctccartggattcaggtttacctcccaccagcaaaactgaagagaatttcccacctcaataatgtcagcagtagtctcaggaataactctcattggctcaccatgcccatggcatcccacgcccatccctgaactaatcatgatggatggggtttcggactgctccttgggctggcctggttaagcgccctcccctggaacctgctgctggaatcagccttagcttaattaccaaggctgagatggaggcaaagggggtttcccaaaggaaaatcaggggcttgagactagaaggaaggggaatagctattggacaaggaaaaagtaaaacaacaacaaacaaaatcacaaaacatcgagttagcctggtgtgatggtgtacccctgtagtcccagctactctggaggctggggagggagggtcccttgagtccagaggtcaaagctgcagtgagccttgaacaccccactgcactccaccctgtgcaacagaatgagaccctatctctctctctctctcacacacacacacacacgtcccccaaaacaaacaaacaaaaacacccatagggacaaaggacagagataatcagcaagaggatactactgccccctaacctgagcaaggtgggggagggggcctttgagctcctaaaaaatctctgaatctgttcattcctctggggctcagtttccacatctaaagtagagttggtttagagcagtggttctcaaactgcatacgaagggaaccccttggtcaaagcaactatttcaccaaagcctaaagcaagacataaaagaggaataataataataaggcattgtgccaggtgtggtggctcatgcctgtaatcccagcactctgggaggccaaggcaggatgatcacttgagcccaggagtttgagaccagcctgggcaacatggggaaaccccgtctctaccagaaatacaaaaattagctgagcatagtagaaggtgcctgtaatcccagctacctgggaggctgaggcaggagaattgcttgaacccaggaggcagaggttgcagtgagccaagatcacaccactgtactccagcctgggtgacagagtgagaccctgtctcaaaaaaaaaaaaaaaacatcgattaaagatttactaagtgctggctgggtgcagtggctcatgcctgtaatcccagcactttgggaggctgaggtgggtggatcacctgaggtcaggagttcgagaccagcctgaccaacatggtgaaaccctgtctctactaaaaatgcaaaaaattaaggccaggtgcggtggctcacgcctgtaatcccagcactttgggaggccgaggcgagtggatcacgaggtcaggagatcgagaccatcctggctaacacggtgaaaccgcrtctctactaaaaacacaaaaaattagccgggcgaggtgtcgggcgcctgtaatcccagctactcgggaggctggggcaggagaatcgcttgaacctaggaggcggaggttgcagtgagccaagattgcaccattgcaatacagcctgagtgtcaagagcgagactccgtctcaaaaaaaaaaaaaaaaaagattaaaaaaaaaaaaagatttactgtgtgctaagtaytgtcttagggtttatgctgattatttaatttaatcccctctataaccctatgaggtrgatattgtcattatcctcatttcaccaaacaatgtatgttggaagaatagggcactgaaggatggtggggaggtgggtctacagattattttggaagcttcctgatcattctgcagtaggtagwgttatttaagagactggagttttgctgagattttgttttcctgtcttgatgaaaatactcttggctgtcaacagtgtkggcgacagaactggcttatcgttgtcatggttgaggaaactgatcaagtgcacttagtacttaaaattgggggagctcagctgtgtgtgcagtgagagtgctggatacacaggggctgttaagcmaaaaatagctgcaaatatgatgcatttggtgcatgcagactcagttccaagtgctccatagtttatcaccttataacaaccccgcaaggtagattatctcagcctgatactagctgtgtgaccttagcaaattcctcaccctctctgtgcctcagtcttctcatctgtaaaatggagatggtaatgttgtctggctccataggttgggagtgaggaggtgtgaggctatattatgtaaagctcttacttagcaaagcacctggcaggtagcagggtagcagacactcaagaatcgttggctggccgggcacagtggctcatgcttataagcctagcactttgggaggccaaggtaggaggatcgcttgaggccaggacttcargaccrgcctgagtaacatagcaagacctcgtctctccaaaaatattttttaaaatagcagggcatggtggtgcacacctgtagtcccagccgcttgggaggctgaggcaggaggatcacttgagcccaggagtttaaagctgctgcattccatcctgggtgatagagtgacaccctgtctctaaaaaagcaaaataagragaggacttgctggctgttattatctttatcagttgagtcacacaaaaagttaaataacgttaaggcacacaaaaagttaaaaaagactcacaaaaagttaaataaggtactctgtaagtaaataaggttaaggcacacaaaacgttaaataaggtactctgcaagtacagagctggttgagggaaccttctgggggatggaagtgttccgcacgctgatctgggcacaccggtgtatgtgtctgtacaaatgtgtgcaactgtatacctaagatttgtgcactctaccgtatacaaatgatacctcggctgctaagctgcagggtttctgtattagggcccatcttgggtcggcaagcggcttggctcagagcacagtctctggaaccagcctcctgtgttcaaatcctgtcactccttactggctgcttgttcttgggcgccgtacttcgcccctctgtgcctgttttcccacctgcagcaagcatagggttatgatgagtgagggagtatcagcaaaatgtttacatggtcttggcacgtggttagcgagctgggggtgcttgttaattgccccgtgggccgtgccagtagcagaggagcgtgtggtcttgcagggcctcggaacgccccctctccacccacatccccttacctcctgcccccagggcctgcggcgggagatccaggcgcatgggccgcgcctggaggaggtgctggagcgcgcgggcgcgctggcgtcgctgcgcagcccggaggcagaggcagtgcgccggggcctggagcagctgcagagcgcctgggccggactgcgggaggctgccgagcgacggcagcaggtgctggacgccgccttccaggtggagcagtactacttcgacgtggctgaggtggaggcgtggctgggcgagcaggagctgctcatgatgagtgaggacaagggcaaggtgcgcccgagctgggggtgcggagggcctgggggcgctggagccgggggccgccgctgccgcctcatcgtgggcgctttgtgcccccaggacgaacagagcaccctgcagctgctcaagaaacacctgcagctggagcaaggcgtggagaactacgaggaaagcatcgcgcagctgtcgcgccagtgccgggcgctgctggagatggggcacccggacaggtgggcgggcgcgtggccagttcacaggaatggtccagcaggacctgaagcttcgctgttgggrgttggcgcagcgctggaattggacgttgggtgggagaggtcctccttgctgtgtgctggagccctcgaatttggcaagtgggcgggccggaatggggggacacggctcagggatggttgagagggtggggccaggagcacctggatttgagtgtagtagtggggaccttgtcgggggagaaaagagtaggcgatgtctaggactggggtagagaagaatttactcaggacaggcaaggggctctttctactcagtgtctgggaggacagaaaagcctgtgctgagattggctatggcggtggggctggagacctcctggtgcagtggggtgatgttgcctcgtgtaggcggatgctgagctccaggcctggaccagggatggaatctgtaaggaggtacagagagagacctctgtccaagtgggctcagagattggggctagaggtgggatgcattggctggggacccaacctgggagtccagagtcccaccgaggttcctggataggaggggcgtgagactgagatagaaaccgggtgaggctgccgaggtgggcggatcacttgaggtcaggagttggagaccagcttggccaacatggtgaaaccstgtctctactaaaaataaaaaattagctgggcatggtggcacgtgcctgtagtcctagctactggggaggctgaggcaggagaatggcttgaacmtgggtggcagaggttgcagtgagccgagatcgcgccactgcactccagcctggtgacagagcaagactccgtctcaaaaaaaaaaaaaaaaaagaaaagaaaaaaaaagaaaggaaactgggtgaggctggatagaggtgagcttatccatttagggaagcrgagctttccctgcatgctgaaatgcagggctttctgaacccaagacttgcagaaaacagagtcctggccaggtgtagtggctcacacctgtaatctcaacactgggaggctgaggcaggaggatcgtttgagcccaggagtttgagaacagagggaacatagtgagacctcatctctacaaagaaatcaaaaagttagccaggtgtagagtcacgtgcctgtggtcccacttgggaggctgcaatgggaggattgcttgagcatgggaggtggaggctgcagtgagttgtgatcacaccactgcactccagcctgagcaacagagcaagaccctgtctccaaaaaaaaagaaaaaagaaaagaaaacagagctctacctggggacacagccgtgtctgaagattccaaggaaacacagccctgtcctggggagggggtttaggggggtcacgctctgccccagaagtctcaggggtccatccctgcccctccatgtcccccttcagcgagcagatcagccggcggcagtctcaggtggaccgcctgtacgtggcgctcaaggagctgggtgaggagcgccgggtggctctggaacagcagtactggctgtaccagctcagccgccaggtgagcgagcttgagcactggattgccgagaaggaggtggtggctggctcacccgagctcggccaggactttgagcatgtctcggtgagcatcattagtaataagtgataccaggagctaccactaaggttctctgggccttagtttcctcatctgtagtatgaggataataacagcacccgcctcatggctctgctgtgagacaaatgagttaatataacgtaaagcactgaggaccctgcttggcacacatgctgcctcacacagtgttggttattattatcagcttattattttattgttacttattgttatttttattgttactgttttgttactattcttgccaggtgttcagtaagtgttagatattattttttatgatgatgatgatgatgatgatgattatcattactcttacctgccacaaaatggtagcctctgccaggtgtggtggctcatgcctgtaatcccaacactttgggaggccaaggcaggtggatcacttgaggtcaggagtatgagaccagcctggccaacatagtgaaactccgtctctactaaaaacacaaaaaaatcagctgggtgtggtggcacatgcctgtagtcctagctgtttgggaggctgaggcaggagaattgcttgaactggggaggtgaaggttgctgtaagtggctattgaaccactgcacgccaacctgggcgacagagcaagactctgtatcaaaaagaaaaaaaaacattgtaggctggagggggctggtgtatgctgcccctttgctcactttgctgtacccccccccccacttcctgatggcaggtgctgcaggagaaattctcagagtttgccagcgagacaggtatggcagggcgggaacggctggcagctgtgaaccagatggtggatgagctgatcgagtgtggccatacagcagcggccaccatggccgartggaaggacggactgaacgaggcctgggctgagctgctggagctcatgggcacacgggcccagctgctggccgcctctcgggagcttcataagttcttcagtgacgcccgagagcttcagggacagattgaggagaagcggaggcggctgccccgcctgaccaccccgcctgagccgagacccagtgccagttccatgcagcggaccctgagagcctttgagcatgacctgcagctcctcgtgtcccaggtggggcgccggtggccatcagggcaggtgggagggcctggacagctgtgggcagcagagtgggcaaaaatcaggctgtggagcaggtcgaaattaggcagtggcacagacagaaagyggactacagaacaggaagaaattagataatggagcagatagaaaatggactgatggaatgatatatagaaatcaggtattggcagggaaaagtggtaccttagaaggtctcacagatattaaacagcttctggctgggcgtggtggctccctttgggaggccaacgcaggcggatcatctgaggtcaggagtttaagaccagcctggtcaacgtggtgaaaccccatctctactaaaaatacgaaaattagccaggtctggtggcgggcacctgtaatcccagctacttgggaggctgaggcaggagaatcacttgaacccgggaggaggaggttgcagtgagcccagatctcgccattgcactccagcctatgtgacaagagtgatactctgtctcaaaaaaaaaaaaaaaaaaaaaagcttccaatagatattgggcagtggttctcctaaaactgtgagttttgcctaaatccagatcaagggtctaaagggaattttgagaagtctgagaggaatttggctgtggtgtagatagaaattagacgacagacaaggccaggtgcggtggctcacgcctgtaatcccaacactttgggaggtcgaggcgggcagatcatgaggtcaggagttcaagaccagtctgaccaacatgatgaaaccccgtctctactaaaaatacaaaaattagcaggaatggtggcgggcacctgtaatcccagctacacaggagactgaggcaggagaatcgcttgaacccgggaggcggaggttgcagtgagccgagatcgcgccactgcactccagcctgggcgacagagtgagactccatctcaaaaaaaaaaaagacttagataacaggtctctgatggaaatcatatgacttttctgaaattaatttgatgggggcgaatttaatgaaaaaggcaacagagatattagaaattaggcagaggttctggccagaattcggatgtggatctgagcagtcagatggaaatgaagctgcaggcccaatacaactcaggcagcaggaaattgggttgcagttctaatggaaggtagaagttgggcaatttttgtttgtttgtttgtttatttttgagacagggtctcactctgtcacccaggctggagtgcagtggcgcgatctcagctcactgcaccctctgcctcccaggcttaagcgattctcctgcctcagccttccaaatagctgggattacatgcacgcgccaccacacctggctaatttttatatttttagtagagacgggatttcaccatgttggccaggctggcctcgaaatcctgacctcaggtgatctacccgtctcggcctcccaaagtgctgggattacaggcatgagctactatgcccagctggcaattwttattattattattattattattattattattattatgaggcagagtctctctttgtcacccaggctggagtgtagtggtctaatctcggctcactgcaacctctgcttcccgggttcaagcaattctcccacttcagcctcgagtagctgggactacaggtgcaagccaccacacccagctaatttttgtatttttagtagagatggggtttcaccatgttggccaggctgatcttgaactcctgacctcaagtgatctgcccgccttggcctcccaaagtgctggggttataggcatgagccaccgcgcccagcccagttattttttataaatcctacaaatgacttagaaatcaggctgagagattcatagtaataagtggtggatctgttagagatggggaggtcacaccaaaataaatcaggagattgaaccaacagagtgagcagcaggctgagcacagtggcttatgcctataatctcagcactttgggaggccaacctgggaggattgcttgagcccaggagttcaagatgagcctgggcaacatagtaagactccatctctattacaacatatatgtatatatcctgatacagtggcatgcacctgtagttcagctattagtaggctgaggcaggaggatcacttgagcccgggatgtcaaggctgcagtgaattgtgtttgtgccactgcactgcagcctgggcaacagagcaagaccctgtctcagaaaaacaaacaaaaaacccaaaacccaaaagatagagtgagcagagctcatacagcagaatgaatggaaattgggcaggggagtaatggcaattgaacagccgtcgtgtaggaaactgggctactatgaaggagtgggtttgaaataaactgagttaaaaaaaaattagcacatctaaaagacatcaaagtggaaaggggtttcctgaaagacccaaggtaggggtgggcctgcctgaaaacacaggtggcagacccaatagaaataaagctctcagaccaaaagaaatcaggcagtgggttgaaagagatgtggtagtagatctaaaagaagtcagaatgcgggtaagtcaaagagaaatcaggcagcagatatgacaggagcctggctgtgggatcacagtgtgaggctccttatatcttgaggttctgcgctggagcagatggtgggagggagggcacagcctgggccccgtggagggctggcgcccgacctggcatgcccttcaggtacggcagctgcaggagggggcggcccagctgcggacggtgtatgcgggtgaacatgccgaggccatcgctagccgggagcaggaggtgctgcagggttggaaagagctgctgtcagcctgtgaggatgcccgcctgcatgtcagctccacagccgacgccctgcgcttccacagccaagtccgcgacctgctctcctggatggatggcatcgccagccagattggggcagccgacaagcccaggtgcccctcatccctcctcgggcttcctgcctccccctggtggcctaccccagccacccccagcccattgacagcccccttctcaatggaatgacaacagccaatatctgtgtggcgcctctgtgtgctaggcactgttctaggtgcttcgtgtgtattcagaccccttttttaggcctgtcattggggacttcggtcatggggcatccttctgtccgctgtccttcccagttgcctattattaccctctccatgggatgtcacagcatgaaacaggctaaagacaggatgggcaagggaggtgtgggactgtatttgtgagggtgggtgaagaattctaacaattccagcatctcagtggcttcattagtgggcatgggcttattgctcacatagtggttggatgtgagtgtccagcagaatcctgtcccctggtgattgggagccagggtccttccatcatgccaccctgggagtcacatgctggaccctctgcatcccgctgcagatgggaaaagatagcaggaggatcacacagaaggttttagggataaagccggcacccacacactgccagcccggtggcctaacctgtctgccagggaggctgcaaatttttttttctcttgagatggagtcttgctctgttgcccaggctggagtgcagtggcacaatatcacctcactgcaacctccgtctcccaggttcaagcgattctcctgcctcagcctcccaagtagctgggactacaggcgcccaccaccacgtctggctaattttgtatttttagtagagaaagggtttcaccgtgttggccactctggtctcaaactcctggcctcaagtggtccacctgcctcagccttccaaagtgctgggattacaggcataagccaccgtgcctgacctaggctggaaatttagtttcatggtgtggctaggaagaaaaggacctagggaatcagggacaccgggcattgcttctgggaatgcagatcctgcagcctgcattcatttactcagcaaatatgtattaaatgcatatggtgtgccatgtggtgagcaaggccaagcacttgccctgagacagattgcattctcatagcacttattactttctgaaatatagcatggggatggggcacagtggctcacgcctgtaatcccagcactttgggaggctgaggcaggcagatcacctgagctcaggagtttgagaccagcctagccaacatggcaaaactccgtctctactaaaaatacaaaaattagccaggcatagtggtggacacctgtaatcccagctacttgggaggctgaggcaggagaatcgcttgaacccgggaggtggaggtcacagtgagccaagatcgtgccactgcactccagcctgggtgacaagagcaaaactccgtctcaaaaaaaaaaaaaagaaaagaaaaaaaaatgaaatatagcgtgggtatatatacatacataggaagggaatgatagctggcaaagtctctctgaggatgtgcgtttgactggagacctgaatgaagtgatgggtgagtcaggtaaagttttgagggaagagttttctaggtggagggacccacaagtgcaagggcccagaagtgggctgtagttaggcatgtgtgaggaaaagctagagatcactgtggccagatggagggagggagtgagggagtgtagggtgagaggaagtgagtacagaggggcactggggccctggaaaccacacatggtgaggagcatgccttctctatgaggaacgtgggagccatgcgagagtttagagcagagtggagtgatgtgatgtgtacatttgagaaaaataggccgggcatggtggctyatacctgtcatcccagcactttgggaggccaaggcgggtggatcacttgaggacaggactttgagaccagcttggccaatgtggcgaaaccccgcctctactaaaaatacaaaaattagctgggtgttgtggcatgtgcctgtagtcccagctactggggaggctgaggcaggagaattgcttgaacctggaaggtggaggttgcagtgtgctgagatcgtaccactgcactccagcctgggcaacagagcgagactctgtgtcaaaaaaaaaaaaaaaaaaaaaaaggctgggcacagtggctcacacctgtaatcccagcattttgggaggctgaggtgggtggatcacttgaggtcgggagttcgagagcagcctgaccaacatagagaaacctcatctctactaaaaatacaaacttagccgggtgtggtggcacatgcctgtaatcccagctacttgggaggctgaggcaggagaattgcttgaacccaggaggcggaggttgcggtgagccaagattgtgccattgcactccagcctgggcaacaagagcgaaattccatctcaaaaaaaaaaaaattaaatatacagggaagtaaaggtaacccacatgtgtatcgtgaacacttggcttgaacaaccatcaacatttggccaatctagccaaaagaggtggctcacgcctgtaatcccaacactgggaggccaaggcaagaggatcacttgaggccaggagtttgagactaccctacgcaacatagtgagaccccatctctacaaaaaagaaaaaaaytagtcaagcatggtggtgtgcatgcctgttgtcccagctacttgggagtctgagggaggaggatcacttgagtccaggagggtcaggctgcagtgagccatgattatgccatttcactccagcctgggtgacagagcgagattctgtcttaaaaaaaaattttttttttttaattagctgggcattgtggtgcatgcctgtagtcccagctaccctggaggctaagccaggatgatcacttaagcccaggtggtagattcaaaccatagcatgaagctatgattgccaactgatggaaccttcagaaacttggaatttgttttggacataagatggcttagaatggtgctgtccaatagttatataacacgagccacaaatgcgagccacatatatactttaaaatcttcttgtggccatactaacaaagcaaagcaaatgaaacttaattttagtaatacatttttatttaacctgacatacccaaagtattatcacttcaacaggtagtcaatattaaaactattaatgaggccagaagttcgagaccagcctggccaacatgccaaaaatccatctctactgaaaatacagaacaaaaaattagccaggcttggtggcgggcacctgtaatcccagctactcgggaggctgaggcaggagaattgcttgaacccagaaggtggaggctgcagtgagccaagatcacgccattgcactccagcctgggcaagaagagcaaatctctgtctcaaaaacaaacaaacaaacaaacaaaggctgggtgcggtggctsacgcctgtaatccctgcactttgggaggcctaggcaggcggatcaactgaggtcaggagtttgagaccagcctgacaaacatgttgaaaccctgtttctactaaaaatacaaaaaaattagccaggcatggtggcaggtgcctgtaatcccagctactcaggaagctgaggcaggggaatcgcttgaacctacctagaagggggaggttgcagtgagcggagatcgcaccactgcacaacaacaacaaaaaactattaatgagacattttacattcttttttacattaactccacaaaatctggtgtgcattttacactttacaccaaaattcagactggccacatttcaagtgctcacatgtctagtggctactgccttggagagcacagacttggaacgttaaaatcattggctagtggaaccttcagaagcatagctagaaaaagtttgaaaatttggatcttggctgggtgtggtggcttatgcccatagccttgaactttgggaggctgaggcaggtggattgcttgagcccaggggtttgagaccagcctgggcaacatagcaagaccctgtctctacagaaaatgaaaaattagttgggtgtgatggtgtgcacctgtggtccccgctactcaggaggctgaggcaggaggattgcatgagcccaggaggttgagactgaagtgagctgcaatcttgccactgcactccagtctgggcaacagagcaagaccctattaaaaaaaaaaaaaaggaaaatttggatcttgaaatcctagaaggttagaatcaccaaagtgtgaaattttagaaacttggaaaatttgaatcattgaattagtgaaccatggaccctcagaatttggtcatcgaaagtaggtgtctcagtctggtttggtgactcaacgcctgtaatcccagcactttgggagactgagatgggaggatcacctgaggtcaggagttcaagaccagcctggccaacatggagaaaccccatctctactaaaaatataaaaattatctgggcgtggtggcaggtgcctgtaatcccagctactcaggaggctgaggcaggagaatcgcctgaactcgggaggtggagtttgcagtgagccgagatcgccccactgcactccagcctgggccatagggtgagactttatctcaaaaaaaaaaagaaaagaaaagaaaagaaaagaaagtaagtgtcttgaggtggtatgggatgtcagcctcaaggatttggggtcaccaggagccacatgtatggggcaggctgaggaggctccctgtggctcagatccctgcctgccacccactgcagggacgtgtcatcagtggaggtgctcatgaactaccaccagggcctgaagactgagctggaggcgcgggtgcctgagctgaccacctgccaggagctggggcgatctctgctgctcaacaaaagtgccatggctgatgaggtggggagcagggagggggtccccctctgccacccgggcacattggggtggaagccattccacaccctgacttccctcccacccacctgccactcccagatccaggcacagctggacaagctgggaaccaggaaggaggaggtgtcggaaaagtgggaccgccattgggagtggctgcagcagagtgagtgggggcccaggcacacgtggttcaagggcacagggacatgctcyagcctgtccagccaaggcccagagggtgacaggagcatgctttgcaccctacccatgggtctccagaagcaaacataagggcctggaagggtggacaagggggctgccttgccattgaatacccacccttgaaaaaaaagtcttaaagtcctgggtggggggacattaaggaaggaggaatgggagtcagaaaggaggaatgatgcccactgaaatagccccagcctctgccattcctgcagagcccaggatggtcagggctcgggtatggaaagccggaggggtgtggaaggccaggggaacagccattgcccccaggaagggccccagatgccccagaatccttaccctgcatgcccctcctcagtgctggaggtgcaccagtttgcccaggaggcggtggtggctgatgcctggctgacagcccaggagccgctcctgcagagccgggagctgggcagcagcgtggatgaggtggagcagcttatccggcgacatgaggccttccgcaaagcggctgcagcctgggaagagaggttcagctctctgcggcgcctgaccacggtcagctccccagatactgccccattacccccacccccaccaagacccccacacccatggctctatatgagacagacacaccgagacatggtgcttggtcctgtgttgtgtgagtgccaagacagactcttgctaggctcccagtggagcagagggacagacctgtcaccagtgacagcccagaatgtcagggatgtgataggggaagaacaagcagagggatagtgcctgggatgggggagtgggagggggaactggcctgggggattctattctgagacttgaataattaggtgaagagaatgtagtaataaaaaggattaggccaggtgtgacggctcatgcctgtagtcccagcattttgggagaccaagatgggtggatcacttgaggccaggagtttgagaccagcctggccaacgtggtgaaaccccatctctactaaaaatgcaaaaattagctgggcgtggtggtgcacgcctgtaatcccagctactcgggaggctgaggcaggataatcacttgaacttgggaggcagaggttgcagtgagccaagatcgtgccactgcctgggtaacagaacaagactccatctcaaaacaacaacaacaataaaaaaaaaamaacaaaaaaaaaccgcttaaaggctgggtggggtggctcacacctgtactctctttggaagcctaggcgggaggatcacttgaacccaggagttcaagaccagccttggcaacatactgagaagccgtctctaccaaaaccaaaagcaaacaaagaaaaaacagccaggcgtgatggcacgtgcctgtagtcccagctactcagaggggtgactgagactcgaggatcacttgagcactggaggtcaaggctgcaatgagctatgatcttgctgcttgcactccagcctgggcgacagagcaagactgtctcaaaaataaataaataaataaataaataaataaataaataaataaataaagtcttaaagtcctgggtggggggacattaaggaaggagaaatgggagtcagaaaggcacgcagagcaattgatttacccaatttttaaaaaagtgatttagccaattcttaaaagagcaataggtgtttgccggagagaataggctttaagttcttggcagagagcaaagcatcgcacaggcctggacaccttgctttttcaaggaactggtcaattgagtgatgaggcagaaaaacccaggccgcctccccggacctcccccttaccccgccccggccccacgcctccaacctaaccctggtccctccatcctcagatcgagaaaatcaaagcggaacagagcaagcagccgcctaccccactgctggggcgcaagttctttggggaccccacggaactggcggccaaggcggcgcccctgctgcggccagggggctatgaaaggggcttggagcccctggcccgccgagcctcggacacgctctcggccgaggtgcggactcgggtggggtatgtgcgccaggagctcaagcccgagcgcctccagccgcgcattgaccggctgccggagatcccggggagggtggagcccgcggccctgccggccgcaycagaggacgcggcggagacccccgcgacccccgcggcggcggagcaggtgcggccacgaccggagcgccaggagtcagctgatcgcgcggaggagctgcccaggaggcggcggcctgagcggcaagagtcagtcgatcaatccgaggaggctgcgcggaggcggcggccggagcggcaggagtcagcggagcacgaggcggcacacagccttaccctgggccgctatgagcagatggagcggcggcgcgagcggcgtgagcggcgcttggagcggcaggagtccagcgaacaggagatgcccatcagaggagacctggtcaaggggtgaggtgcccgccttatgaccagaaagtgaggggaggggaaagcggagagctcctagaacccctcaggcccagtgaaagggcttcagggctcagaacttcccaaagaaggagatatcgccgcggtacccattttgcagaggtgtaaactgaagctgcaagataatcgatgtgcccattgttacacagaaaggggagcccttcctgttgaaagaaaaggcagactgcctttctccagacgtaggttctcggcccctgggttgtgactcctgcatcaagtctcccgggtgccccgaggcagggattttgtcctctctgtgcctcagtttgcccactgggctaatggtggaaccctcacctccttgattggagaggagaccctttatcacaattctctcagcagccttatgaagtgggggctgttgtcttctccattgtatgactagggcaactgaggcacaaaaagggcaagtcactcagcttaaacgaaccaggactttcagaatccagagttggccagtgtgtgttgtgcagatctgtccagtcagctgagtgtgtctccagaaagaggcctttggtcaggagacaatgacttcttgattctttttaaattgcacatttcatgaacatttgctgagtgcccactctgcctggcatgtgctgagtcgagcggtgactgaaccagtcccatccctgactttagagactcacagtccattgggaaaaacaggcttgtcatcaatgatgaccsagaattatctgggctggaatgggggcgattgggggactggagagtcaggggtgggtggagaaaggcaacgtttgcaagttgttctttgtgctgcttaaaattcaaaggggcatctgggcgcggtggctcacgcctgtaatctcagcactttgggaggttgaggcgggcagatcacttgaggtcagaagttcgagaccaacctggccaatatagcaaaaccctgtctctactaaaaatgcaaaaattagccggcatggtggcgcacgcctgtagtaccagctacttgggaggctgaggcaggggaatcgcttcaacacaggaggcagaggttgcagtgagccgagatcatgcaccactacactccagcctgggcaacagagaaagactccgtctcaaaaaaaaaaaaaaaaaattcaaaggggcgagaggtttggtcttccattcagcagacacgtcccaaacacctgtggtacctaaggcgagcatctgagagaaacagctgcagaagtgggcaggggcctggcacttccagctaagaagtggaggctcctctgcccagccagacaggtccatgggagaaggaaccctggtttcactgggtctttctgtcccccatcccccaggaaggccaccctggctgacattgtggaacagctgcaggagaaagaggcaggcccagggctgcctgctggggtaagttgagcctcggatgggtggggatasgaggacccctttttcagagcaggaggcaggatctcagaaacagccagtgcctagccctggcaggacccattccctacctggaccctgcagagacagcatggcctctcagggtccccagaatctgaaaatgtcccccttagaaagacggggcacctacctaagagacccctactgcccctccacacacacacacacacacacacacacacacacacacagacacacacacacagacacacacacacagacacacagacacagatacacacacagacacacacacacagactcttcccacatctgtcctggactccgtatttcttcagcycagtggggtcccaaatttcttcatagcctcatacacacacacacagaaggaagccccaggttyctcctgcagacagtggggacacgccctgcttgcacccccacctccagagatctggctgcctctttccaccaccgagagagattccaaaccaatgagtcctaacagactcactcccaagacccatggggccctaagaattgggcctccaaccctgaggtcctcccatactcgcctccgagacaaatggccctgtagacagatgggaccccagacccatgactcccccaaacagatgacccccacacctctccatggacagcacccctcttccccctcccttcacacagccgtcgctgcctcagccacgcgagcttcccccaggtcgcctgcccaacgggcttgagctgcccgagcggacacctcggccggaccggccccgggcgcgggaccggcccaagccgcgacggcggccgcggcccagagagggtggtgagggcgggggaagccggcgctcgcgctccgccccggcccagggcggctccgcccccgcgcctccgccaccgcccactcacacagtgcagcacgagggcttcctactgcgcaagcgcgagctcgacgctaaccgcaagtcgtccaaccggtgagcgtgtgggcggggctttggaaggcgggtctcaggctcagggtgaccattgcgtggagcggtgggactgaggagggggtgtggctcaacttcaggccctccagcaggtggsggtagtaggtggggccagagctggggggtggtggtggcttaaatcaagaaagccaaccaatgagcaggagggggtgtggtttaacgtcaggccctccaacccgtgggggtagtaggtggggccagatgaggggtggggctcaactttgatgattccaaccaatgaacaggaaggggcaggacctaaggttagtgcatctaatggatgatgggtagagcttaggtgggaacagaaggaaaatgttctgaaagtgagtaaattggaacctaacctcttagcaaccaacccaggagttgatcagctaaatagcaaagagggaggcatctagttgagaaggtttcaatggcttgtcgtggagcttggagaggtcactcaaccaatgagtggggtgggtctacccttgaagtttcaaattgggggagggtccgaaaacgggcagagcccaaactaatgagggtaggggttgggaagggggagtcatctcttacaggtttccaaatgagggtctagccatgatgtgcctgctcttggggagtccagctcctgcttgtccaccctctttttgtccaactgagaggcagaatctggggacaagtggagccaaaaaggggtatcaccggccagtaatggagtgagtcccaagatatgaagtgggcaggacagattcagattttgctagtggaatctgtaggtggtctttcttcctcgtacctaatgccaaggtaggaataaacaagggcacctagtatgtyttgctttgggagggattcctccaggatcgaggctttggatgactggagagacaggaattctttattccagacagtagaccaatagactttccttgagaaagctccatgagtggggaggattgagtggagcaaaggcttatggaggagacagcttaagacttaccttcaggaaattcagtatgggaggggataaggaagggaaatctcagcctgggcaaaggcttgatactgagagacttaaatgctcccctcagggcagcaacagccttaaggaagagcattttaggtccaactagggcgcaactagggcgcaaaggtccagaggtaggaaggctcagacatattcagaccttgaggatgttaatgaagagttattaggcagagtgctgyggctctgccttgagccccatcttgtcgctccaggtcgtgggtgagcctgtactgtgtgcttagtaagggggaactgggcttctacaaggactccaagggcccggcatccgggagcacacacggtggggaaccgctgctcagcctgcacaaggccaccagcgaggtggctagtgactacaagaaaaagaagcatgtcttcaagctccagtgagccccccaatgggcaggagggagggatccaaggctcagcttcaactcccagtgggaccctggcttccctgggggacacttggtgggcaggtgggctgggccccttccccagatctctsaagtcctgtgtcccttcctgcaggacccaggatggcagtgagtttttgctccaggcaaaagatgaggtgagatctggtcctttcctccctctgtgtggacctcagtaatgacctggctgtctggctcctgacccagagtgatggggctgtgagaagggacactcacaggccagagttatcagggctgtaatgggaaagcccacaggcactgagagcccaaaggaggttcctaacccagtggggagtgggaagggcttcagggagggctgcctgcagatcctgatgacaaagtccaacatctttgccgtggtcactcaggtgagactggaatggagggagttcgctttaaaaaggggtgatttggccaggcgcggtggctcacgcttgtaatcccagtactttgggaggccaagacgggcagatcacctgaggtcaggagtttgagaccagcctggccaacatggtgaaaccccgtctctactaaaaaatacaaaaattaactgggcatggtggcaggtgccttaatcccagctacttgggaggcagaggcaggagaatcgtttgaacctggaaggcggaggttgcagtgagctgagatggagccattgcactcaagcctgggggacaacagcgagacttccttcgaaaataaaataaaaataaaaagggtgattcagagggacagtgggggtctaaaaaaaggagtgattcaggttgggcaccatggctcaggcctgtaatcccagcactttgggaggccaaggcaggagactgcttgagcccaggacttcaagatcagcctgggcaacacggaaagatcccatctctatgggtaataataataataaattagccgggagtggtggcacatgcctgtggtcccagctactcaggaggccgagtggaaggatcacctgaaccagggaggtcaaggctacaatgagctgtgattgtactatggcactccaggctgggtgacagagtgagattctgtctcaaaaacaagagggggtgggtgatctaggtagagggaactgcaagtgcagaggaccagaggtgcagtattgcaaagggttaactgctggagggcagagttcatggaagaaggtcccagaaaggttcccaggagataggtgtctcaggacaggatgggccatttggaggagattggattttttacctaagggcactggagagctaggggggattacagtgatgtgtaaaaaagattcctggctgggcgcagtggcttacgcctgtaatcccagcacttcgggaggccgaggcgggtggatcacctgaggtcaggagtttgaggccagcctgaccaacatggagaaaccccatctcttatggtgcatgcctgtaatcccagctactcgggaggctgaggcaggaggattgcttgaacccggaaggcagaggttgcagtgagctgagacagcgccattgcactccagcctgggyaacaagagcaaaactccatctcaaaaacaaaataaacaggccgggcatggtggctcacgcctgtaatcccagcattttgggaggccgaggcgggcagatcacaaggtcaggagatcgagaccatcctggctgacacggtgaaaccccgtctctactaaaaatacaaaaaaattagctgggcatggtggcgggcgcctgtagtcccagctacttgggaggctgaggcasaagaatggcttgaaccygggagrtggagsttgcagtgagctgagattgcgccactgcactccagcctgagcgacagagcgagactccatctcaaaacaaaacaaacaaacaaaacaaaacaaaacaaaacaaaacaaaaaaagattcctttggctacctgggtgggtagcccaggccgcggccagggcagggacccaagtgggagagcgcatggctgggccacacaggcctgtggggagaggaggaagaggagtctgagagaggcaagcataaaggtggtttgaagagatgttgagagtaataactaacacttgttatctcattcaatcttcacaagatgcaatgaagaagtgggctttttttttttttgagacagagtttctctcttgtcacccaggctggagtgccatggcgcaatctcagctcactgcaacctccacttcccgggttcaagcgactctcctgcctcagctacctgggtgactgggattacaggcttgcgccaccatgcccggctaatttatgtatttttagtagagacggggtttctccatgttggtcaggctggtctcaaactcctgacctcaggtgatccacccgcctcagcctcccaaagtgctgggattacaggcatgagccaccacacccggccagaagtaggcctttacccactacatgccttcttttacttatctgcacaatgaagattaaaaatagtttcttggcctggcatggtgcctcacacctgtaattccagcactttgggaggctgaggtgggcagatcatttgaggtcagaagttcaagaccagtgtggccaacgtggcgaaaccccatctctactaaaaatacaaaaagtagccaggcatggtggcacgtgcctgtagtcccagacactcrggagactgaggcacaagaatctcttgaacctgggagatggaggttgcagtgagctgacatcgagccattgcactccagcctgggggacagagcaagactctgtctcaaaaaaaaaaaaaaaaaaagtctcttatcatagggttactgtgagaattaaattgctccatgtttaattgatacatgataaactgatacttagcacagggcctagtaaatatcagtgctctagtagtgcctgcccatattattatcattgtttgtgtcatttatctctgtagtaggaagtatatacaatcctattgcataggtttaagggaattaatccactaaagtgtttggaacagagcctggcacatattgctatgtaactgcatcatcatcatcatccctttttaatagatgagaaaactgaatttcagagagggtagtctgatctgaaattcacctattattccagcttctctcttccaaatacggcctctgtgccctgtttcttcccccaggaggagatgaacggctggctggaggctgtagcttcctcggtggcggaacacgcagagatcgcccgctggggccagacactacccactacttcatccacagatgagggcaaccctaagagggaaggcggagatcgcagggccagcgggcgcaggaagtgacttcccacccccaggacctgacacatctcgtctcccctcttttccgcactgtgggcacaaagacactttttcttccgcaggggcgggagcccctagttccaacactgaggacgcgtgacatggtgggcaccggaaaggaggggacttctcctgcaccccaagaagtggtggggagattgctgcccctatagccatatctcggccccttcccactcaccacccccaccccaggtgctgggggtcccttatttttatgcaataactgagcttgatggsggtgggcagggggccagttgagccaagcccccagccccgatctgcagatcctgccccaagaagctggggtggtgggggcagtaattcctgcccccctctctgccctagggatgggcacgggggcgctggtgaggtcccctggaccatccagggtgctagggggcagggaggggacccccccccctcccgcctttacctcacttccaatgctgccttgatctctgtctgggaggggggagtgaaggggccctagccccctgcactccgccgcctcagagccatgcggttaattcctgacttagtttatttttgcaaaacgtcgatctcctcctcccccgccccgcatccgcgaaggcttttaatgggaggggcgtcaaagctcaaaactgttttcctctctcctcccccctccagttgtaaatgccacttcatgaggggaggggcgaggggaagcccacccctgcatgcttctggctggagcacctccctggggagtcgggggattgggttgtgggcagtccccatggccgcctggagaagccgctggggcccgggggtgtggggcggtgtggcgggcgcacactgtatgtacctataataaaccctttggctttgacggtctatggtcctttgtttgggttttctgggctgcgcccgggaggattgaaaggagggctgtggtggctgtaggggtgggtgcggggtggggagaggggcacgggggtaccgtggctgcggagaacatccagatgtacccttttatgtggacttaatttcggggtctaaacacacgccccttgacgagaacctagagggatggagaatatttcgttatgcttcgtaataaacttccccaaaggagactccgggtccgccccgtcaagttcaggaaaggcggacccctttaaggaggcggaaaagttaaccgcgatgggcaggcgctctgtccaatcgctagtgactcctggagtctctggcccaatgagcagcctatggaggcggggtccgggtgcacacccggaagtgggtgcgggccagccggctcgcccgggggccatggcagcagcggctactgcagccgagggggtccccagtcgggggcctcccggggaagtcattcatctgaatgtgggaggcaagaggtgagtgtgggagactcctgaggtcccatcctcgggggcgggaagcggggtgggagtatccgcctctcctgggggaatccctgtccatcaagggttgctccgccccccccccctttggaggcgcgagattctggaaaaacgccgggggagggggaaggggagggaaccctggatcctgcgggagggggacgcattcctcacccgctcctcttcatctcttgcgtccgtttaccttccccgcccagattcagtacctctcgccagactctcacctggatcccagactccttcttctccaggtgatcgggagagcgagtttggggcgagggtaggagggatggagagggcgtgggagacctaatatccactcccccggcccgtgacgcctgctcggtgtcccttccctgcagtcttctgagcggacgcatctcgacgctgaaagatgagaccggagcagtgagtcggacaagaactgaaatgggatgggggggaggggttggtaggaagaggggcaggaccccactcagtcctgccttttaccccatccatcctctgcccccctttcccgcagatcttcatcgacagggaccctacagtcttcgcccccatcctcaacttcctgcgcaccaaagagttggatcccaggttggcatggaaaaaggggagggagtccctcactgtcttcagtccctgaggagttctttcacctcctctgaatgtccacgtgagctccattctattagaattctcattcagaaccttgatcacaggccgggcgcgccgggattgctcacgcctgtaatcccaacactttgggaggccgaggtgggaggatcacttgagcccaggatttggagactagcctgggcaacatagcgagaccccttctctaaaaaagcaaacaggcaaaacttcatgagaatcttgatcatgttaaaattttatgtccttcgatttctccctacacacacacacacacacacacacacacacacacacacacactcaacatttcctccacccatatcatcactccttagcatctttattccatcaaaactttctaccccttgacattctctgtgcagttttgaaaattaccctctcagcattctctgttcacccccacacctagaccctgacctctagtcaattctactacccaggggtgtccacggttccagcctcctccatgaagcccagttctatgggctcactcctctgggtaagtgggagcccccagctatcatcctcattgtatagaaaaccaactctgtgatgctacctgcccctcttccccttctctcctgaaagagggctggggtagaggtgggaggactggttatggccctggccgggtctgtattcgtactgggaggagtattggtactctgtgtagaaagaaatggggagggggaaatggggtggcctcagcatctccctaagtcccagcctttaagtcctcctgttgcagttcgtcgcctgcagcttcgagaggagttggatcgatcttcttgtggaaacgtcctcttcaatggttacctgccgccaccaggtaggcactcccaatggaatggaggggcgcggaggtgggccaaagactacatttcccataaggctgcagctctcgggtgcctgtgctgtgcgtcctgagatacagtgggaggtgtagttccctatcagatgcttgggctgatgcttggaaaggaagttggacacagcatttcccatgagacaatgggccagctaactcttgaggctcagaaggatgtcctggagccccatgggagttgtagtccgggtttggtttctttgtagggggggctttggaagacctgggattcttcgtatggaggggagaaatattaataggaagttattgacagtaatgcccatgatagccagcccactggccatggaaggtatgccccagtggttattggaactaggcttttctgattggtagaaggaacagagtagggaaatttcatctacagctttatttccctaactgcagtcagcacctgctaccttcatgaaagttgccagatataaagatctgtagtagtacttttccaacttagttttatcctgttttccgaaaaacaatcatttatttatttatttatttatttaattttatgagacagggtctggctttgtcacccaggctggagtgcagtggtgcgatcttggctcactgcaacctctgcctctcagattcaagccatccttccacctcagctctgccactgagtagctgagactacaagcactcgccaccatgcccggctaattaaaaaaataataatcattttaaatgcaagctttatattataaatacaaagtaaacatgaaaataaaacccaaacatagcagtgttattaaactctggcctgtagcagtggctcacacctgtaatcctagcagtttggaggccgagacaggtggattacttgagacctggagtttgagaccagcccaggtgacacagcaagacctcatctctactaaaaataaaaaaaaattagccaggtgtggtggtatgcacctgtggtcccagctacttaggatgctggagtgcgaggatcgcttgagcccaggaggtcaaggctgcagtgaactatgatcactcattacaccccagcctgggtgacagagcgagatgctgtctcaaaacaaaacaaaacgaaaaacaactctggctagatgctattgcttgccaagggtgcagtcttccatttattaaaagtgaaaattagggccaggcacattggctcatgcctgtaatcccagcactttgggaggctgaggtgggtggatcacctgaggtcaggagttcgagaccagcctggccaacatggtgaaaccttatctctgccaaaaatataaaagattagccatgtgtcgtggtgggtgcttgtaatctcagctacttgggaggctgaggcaggagaatcacttgaacccaggaggcagaggttgcagtgagccaagattgtgccattgcactccagcctgtgcaacgagcgaaactccaactcaaaaaaaaaaaaaaaaaaaaaaacggaaaattaggtaatactgcagattcattaatatcacagcagcactaaactcagtcttcctctgtgctgggctcaagggaactgaaagggaagtaacttgctatgtggttcagtgtcatttcatgctgtgtcactgcaccacttaaaatcttcacccggagactatgtcccacacatggggaaatcaatcaccgtcatattttaagtgcttgctgtgtgacagccacgattacaatgactgttactctacctcttattctcactgtagtgttcccagtgaagcggcggaaccggcacagcctagtggggcctcagcagctaggaggacggccagcccctgtccgacggagcaacacgatgccccccaaccttggcaatgcagggctgctgggccgaatgctggatgagaaaacccctccctcaccctcaggtacgtttctatctcgtggaaggttggggcagctgtggggtccctgtgaccctcttctgatccctactcttcccctcaaggacaacctgaggagccggggatggtgcgcctggtgtgtggacaccataattggatcgctgtggcctatacccagtttctagtctgctacaggtgcttggggagggagtggcaggaggtcccagccctgttgatgggaagggcatgcggtgagggttggtgatgtcccctcgatcctacaggttgaaggaagcctctggctggcagctggtgttttccagcccccgcctggactggcccatcgaacgactggcgctcacagcccgggtgcatggtggggctttgggtgaacatgacaagatggtggcagcagccaccggcagcgagatcctgctatgggctctgcaggcggaaggcggtggctccgagataggtatgaccccaagccttttccagaaccctctgtcctttaaattctactgcctgttaaaatgacccaccccataaaatcctcaaacccataagaattctctgctctattagatctgtttgtgtcattagaatgctccagcccttcagaattctgtatcctgttagaattccctggcttcctagaaaaatccacccacatacaattctccctccatcagaattccctgccctgttagatctcttggttttgttagaatgcgctattctgtgtggccatgagaaatgtctgacttggcccggtgcggtggctcatgcttgtaatcccagcactttgggaggctgaggcgggcagatcacttgaggtcaggagttcgagacccccttggccaacagggtgaaacccagtctttatttcaaaaatacaaaaaaattagctgggtgtggtggcacgtgcctgtaatcccagctactcaggaggttaaggcaggagaatcactggaacctgggaggcagatgttgcagtgagctgagatcgcaccactgcattccagcctgagcgacagagtggacagagtgagacaccatctcaaaaaaaaaaaaaaaacaaaaaaagaaatctctgacttatggctgggcacagtaactcacatctgtagttccagcactttgggaggccatggcaggaggattgcttgaggccaggagttcgaggctgccgtgagctatgtaagccatgattgcaccactgcactccagcctggacaacagagcaagaccctgtctcaaagccacagcaacaaatctcggacttattaatctgtccccaaataaatctcagccctcgtaagaatcccctgccaccagtggaggtttttttgccttattgcaaatctcagtgctgttagaattccagaccgttttagaatcccataccccatcagaaatcttctggcccattttatcttctctaattcctgctggaatcttcactttttttttttttgaaatggagtcattctctgttgcccagattggagtacagtggtatgatctcggctcactgcaacctctgcctcctggggtcacgcaattctccttcctcaacctcccaagtagctggggctacagttgtgtgctaccacactcagctaatttttatattttttagtagagatggagtttcatcatgttggccaggctggtctcaaactcctggcctcaaatgatccgcccacctgagcctctcaaagtgttgggattacaggtgtgagccactgtgcccagcccctgatggaatcttctatccttcaaggattctgtggtcccactgaaccctctggtccttggagttcttcctcccacctctcctcctccatgaggcagggttccagctgagccctttttgcccactgcaggggtctttcatctgggggtgcctgtggaggccttgttcttcgtcgggaaccagctcattgctacaagccacacagggcgcatcggggtgtggaatgccgtcaccaagcactggcaggtcag

SEQ ID NO: 97426 - DNA, 15328 bp, Homo sapiens
ggccttagttcttagccccacatccttgctggctgcagaatagcagcgggttctgggtaaggagcattctgctaaaacgctccaccctgctccctcatctgtcctctccatttgtccccatcagatggtttaagtgcttaaggggactccagggcggagtcagggagaaccctggctctcctgggctaggcacaagatcattctacaggaaaccttgtgggaattcttctgggacaaattattggtcagcgctgagcttagctgtgtctgtgacactcgcattctaactagggcctatctgacgtcaacaggaagtaaggctgatgcagtggggccaagggagtctgggagaagaaagtcggttcagagccctggctgccctgtcccacactccacccttccggcaagaatccagtccctagatgaggtggggagtgagtggtcgagttaaaaatctctgggtcgggtacgatggttcacgcctgtaatcccagcactttgggaggtgaaggcaggcggatcacttgaggtcaggagttcaagaccaacctggccaatgtggtgaaatcccatctctactaaaaatacaaaaattagccgggtgttgttgtggcacgcgcctgtagtcccagctactcgggagtctgaggcaggagaatcgcttgaacccaggaggcagaacttgcagtgagccaagatccagccactgcactacagcctgggcgacagagtgaggcttcgtctcaaaaaaaaaaaaaatctttgggccaaatctccagacagcacaggcaggtgcagaaacccaccaggaagctgcctgtgtacctctggcagattggagcctggcctaaagctgccttttatgcagcttgggtcaaggttaaacatcatgtcacagtgatttttctcactatgtgtgagacatggagaactggctccaagtactactctgtccactggtggctggactactgatgtgcaccactctccactcctctcaccctgcagtgggtcatggccccgtgccggggcagaggagaaaaatgggctgccttctccaggacaaaccctcactccaactcaactagggtgctgtgatcagaatgtgcaattgaggtgtgattttactgattttttttttttttgagaccgagtttcgctcttgttgcccaggctggagtgcgatggcacgatctcagttcactgcaacctccacctcccgagtttgagcaattctcctgcctcagcctcctaagtagctgggattacaggcatgtgccaccacgcctggctaattttgtatttttagtagagacggggtttctccatgttggtcaggctggtctcaaactcctgacctcaggtgatccacccgcctcggcctcccaaagtgctagaattacaggcgtgagccaacgtgcccagcctgtttttgttttttgtgttttgaagcagggtctcactcagttccccaggctggagtgcagtgacacgataatagcttactgtagctgcaatctcccgggctcaaacgatcctcccacctcagcctcctgaacagttgggactacaggcacaccaccacacctggctaatttttttttttctttttttagtagagatgaggtcttgctatgttgcccaagctggtctcaaactcctgaggatcaagtgatcctcctaccttagcctcccaaaatgctgggattgcagatgtgagccaccacacccagcctgattttactttaaatgagagtccctcttcagagtccctcagctgttcctggcccctggccatgtgccttcagttgcccctgcttctgtggtatccttaaggctacattcagtgctgaggccctaggcaggcagcagagagaagccaaatgattctgtctttcccttatccacccagagcatgcaaaaccaggagcagtggtgggttcagggtgggcaccagctatgtatatgtacatcagggacagggggccaaaggcagtcagtttccaaagactgccccagaggccatttttcagagaagccctgggttcctcaagggccctgtgtccatgctggcccatcttgcaggacgagcctgtggagtgggagacacctgacctttctcaagctgagattgagcagaagatcaaggagtacaatgcccagatcaacagcaacctcttcatgagcttggtgagttgactgctcaggaagggggcgtggggaggagcaggtacccagctatgtgcctgatactcagagggtcacaactgaggttatcttgggtgggcgcaagcagtaatttgtgcatacccagcctagccccaagtagactgacatctcacctggaacctattatcaaggtttggtttctctatttctttagaacaaggacggttcttacacaggcttcatcaaggttcagctgaagctggtgcgccctgtctctgtgccctccagcaagaagccaccctccttgcaggatgcccggcggggcccaggacggggcacaagtgtcaggcgccgcacttccttttacctgcccaaggatgctgtcaagcacctgcatgtgctgtcacgcacaagggcacgtgaagtcattgaggccctgctgcgaaagttcttggtggtggatgacccccgcaagtttgcactctttgagcgcgctgagcgtcacggccaaggtgggcttcccaccccaccctgccctatgtgagggtatatacgcatgcacctgagcatgcaggggctgagcagctggccctgtctctgatcattacttccccttcacagtgtacttgcggaagctgttggatgatgagcagcccctgcggctgcggctcctggcagggcccagtgacaaggccctgagctttgtcctgaaggaaaatgactctggggaggtgaacgtgagtacatagttcttagtttcttggttgtcactagacaggactgatgggctgtagctacagtaaggcttggaggaggaattgtgctggaagacaagccctgcaaaacagttccaggagtgtataggcattgtaactaaagcaaaggcttccagaccactcatgccaaagcctagggttgtcccaagaagccaggaagaattgccttggtgctttgatctttcctggtgtggaaaatcttctggagatgcaggagtccatctaatgacatgaggaggcccccttcagactttttacctggaagctttctggctccaaggtattaggcctgtggagtgaaattagactcagaatatgcctgacctgtccacaggtaattggggaacatctgacttggttgtctcagtaaggtgaccgttttgtagggcccatcttccatacaaactgctgtcagggatcctaccagagatcattcagccaagagcctgacatcagaaagcccagtcctagcttgtgtgaacatgaggtgctagtcttctctggggagggtctgctggcttggccatcccttctgcagcctgtacactccccttttgccccttgcagtgggacgccttcagcatgcctgaactacataacttcctacgtatcctgcagcgggaggaggaggagcacctccgccagatcctgcagaagtactcctattgccgccagaagatccaagaggccctgcacgcctgcccccttgggtgacctcttgtacccccaggtggaaggcagacagcaggcagcgccaagtgcgtgccgtgtgagtgtgacagggccagtggggcctgtggaatgagtgtgcatggaggccctcctgtgctgggggaatgagcccagagaacagcgaagtagcttgctccctgtgtccacctgtgggtgtagccaggtatggctctgcacccctctgccctcattactgggccttagtgggccagggctgccctgagaagctgctccaggcctgcagcaggagtggtgcagacagaagtctcctcaatttttgtctcagaagtgaaaatcttggagaccctgcaaacagaacagggtcatgtttgcaggggtgacggccctcatctatgaggaaaggttttggatcttgaatgtggtctcaggatatccttatcagagctaagggtgggtgctcagaataaggcaggcattgaggaagagtcttggtttctctctacagtgccaactcctcacacaccctgaggtcagggagtgctggctcacagtacagcatgtgccttaatgcttcatatgaggaggatgtccctgggccagggtctgtgtgaatgtgggcactggcccaggttcataccttatttgctaatcaaagccagggtctctccctcaggtgttttttatgaagtgcgtgaatgtatgtaatgtgtggtggcctcagctgaatgcctcctgtggggaaaggggttggggtgacagtcatcatcagggcctggggcctgagagaattggctcaataaagatttcaagatcctcctgctgttggaatcttttatacatataaagtttttgtagagacatgagtctctctgtgttgcccaggatcctcccaacttggcctcccaaagtgttgggattacaggtgtgagccaccctgcccagcctggactctttattattataggcgcagagctgcagttgcccctcatggtgccagaagttgccaagggtgatggacaggctcccaggtgtcttgcaaagtcaccatggaccaatttgtgaagatgtagtatgcatacatacttggtcatcactcagctccctggggctcaggttgtggtggagacaaaaatggactgcagttagaacttagggaaactggctgggcatagtggctcacacctgtaatcccaacactttggttgggctaggtgggcagatcacttgaggccaggagttcgaggccagcctggccagcatggcgaaaccccatctctaccaaaaatacaaaaaaaatttagctgggcgtggtggtgggcgcttgtagtcccagctactcagaaggctgaggcaggagaatcgcttgaacccggcaggcagaggttgcagtgagtggagatcacaccactgcactccgatagagcaagactccaactcaaaaaaaaaaaaacggccgggcgcagtggctcaggcctgtaatcccagcactttgggaggccaaggcgggtggatcacctgaggtccggagttcaagactgcctgaccaacatggtgaaaccccgtctctactagaaatacaaaaaaattagccggcatggtggcagatgcctgtaatcccaagtactcgggaggctgaggcaggagaatcgcttgaaccctggaggcagaggctgcagtgagccgagatcgtgccactgcacattatcctgggcgacaagagtgaaactccatctcaaaaaaaaaaaaaaacaaaaccatcccttcaacacacacacaccacgctctgggagaaggtgtggcataactccttcaccaaatacagagctgccaccgtggaccagacactgctcgtgataccgagggtatagctgttaacaattcttgctttcattaagcatggactctgctgggtttgaaaacactgaattcgaagttcttcagaactgaatgtaactatgtgaatctggccagttccttaattttctttcaacttggttagttcacataagcgtggcaatcgcaaaaatacagctgtgaaaatagaagccagatgggcacccggcggtctggccttaggccctgaagtgcaggtttgaggattggtgcttgcgaagtcctgctaggcctgaactcaggtgttgggggacgtcagagccgccaaatacacccaaaagaccgggaggactcacggccaccactttcctcggtgggagctgtcccagctggtcagatcgcgcttgctgggacctgggatctcgcaacgcatgctgggatgcccagcatctaagggcgcccattggtcccgcccccacgacttgagcaacagccaatcagaggtggcagcgtgcggaagcggaagtgaggtttccgtggagacagccgagcctgcggaaggcggcggcggcggcacctgcgatcagcggctggggcaggttatggtagtgcggactgcggtgtgagcagagcggccacggggcccgccatgcgccggcggccctgacatgggcgccagcgggtccaaagctcggggcctgtggcccttcgcctcggcggccggaggcggcggctcagaggcagcaggagctgagcaagctttggtgcggcctcggggccgagctgtgccccccttcgtattcacgcgccgcgggtaagggcatgggttccaccctggcggggggaacaggcgggcggycaggcgtcccgcgccacgggggaacttccaccgctgtaccccactacagccaagccaggacgacccccatattttgagcctcattggagctgggggtggagaaagccgggcagtggtctcctggcggcctggccactctgaaagtctccctagggaagagtgggcctgaggcttgtcactggtcggaccttccgcacggtaaagctaagctagggcctccataagacctccataagatctcttcctttcatcccttccggctcagcctgcatactgaagggtcctagcctccctttcccccccagttattccaaggggataataaccctctgtttaggctgcttttcctgacagtagtggggctgaacctttgagcgtagtggctgggaaagcagggataggcctcagtattgggggtgaggctgaggaaaaaagaccctcacccagttatgttctccagatccagagcgctgacctacccacccaacccccagcccagtctcccagaggcccgcacaagagtaccagattggcttggctctagtgggctcctggagatgggcgctccctgtgctagagatttggctgtagacaccaggaagacccaacagtggcaattcaccagccacctggggtgtggggtcaggggagacgcagccttcattcctttgtgcttcttcctagcttaggcttctgctatttcagtctttgacactgggccagcagcatcttctggagtgagaccaacatgcccaggccaccaccctgcccactctagaagtcctgggtgaaggcaaagtcctgatattagaatggctgcccttgctgaacaaatcaaggatgagaactggccttggtggctgcctggatggtgtgctctggtgtgggctctcttcttgggggtctgacatagtagcactgcccacccatcacctcacttcccactttcttctagtagaccccaaaccccaggcaaaggattctccaggcaggccaggcaccgtggctcacgcctgtaatcctaacactttgggagatgaagacgagtggattgcctgagttcaggagttcgagaccagccagagcaacatggcaaaaccccgtctctactaaaatacaaaaaattagcagggtgtggtggtgcatgtctgtagtcccagctacttgggaggctgaggcaggagaattgcttgaacccaggaggcagaggttgcagcaagctgagatcgcgccactgcacctccagcctgggcaacagagtgagattctgtctcgaaaaattttttttaaaaaaaggattctccaggcatattatcctcttttcttcccacttggggttgggaagaccacagacttccccgtgacctgtgacatttgccatgcccaggtgtggggctccagcccagcctgtttccttctccctctacacagctctatgttctatgatgaggatggggatctggctcacgagttctatgaggagacaatcgtcaccaagaacgggcagaagcgggccaagctgaggcgagtgcataagaatctgattcctcaggtgaggggctgggcagyggtcacagagcctacactaagcgtgtggaggtggacccagatgggatctgttgtcatggtgggggcttttgcggggggatctgggaggaacaaggaagcttcctgaagtagaggccctgagctgacccttactagcctctgtttccatggcagggcatcgtgaagctggatcacccccgcatccacgtggatttccctgtgatcctctatgaggtgtgaccctgggaggtggcagacagaagcaccccctgccccggcaagaaactcccaggctcaatcaaggtgtggcttccattgaggagcccaggctggggccacaaccctgaataaactctgttggcccataaccttcagctgtgagcgggtcggtcccacagtattggttgggtgttggtttgtgtgtggacaagaggtggttggtgggtggtgaaggctaatggcagagttagcaccccactctcccaagccacccytgcaagcagcayagcagggcatataccagtcaggaatgcccgttacctggttccttgcctggtctgctttcttccaagtttgcctggggcctagccctgctagaggctacagcactttacaagcaaggtatgctttcttccagcccctaggctgtgggcactgtatacaagtaggaacttcctttccttcacttcccttttaacccctagtcagagcatttcagccgtttgctacctcgattcctcctgtgttggacagaggctgggggcagtgccagcctgattcttccgacctacctgccatttgttcccgccttcagatggatggacagtttgctggctattgataggagtggggactgggtgggggcttctccctctacccagggctgggctgatccccctactgcaactaactgttgccccccaaccccgaacccccagttgaggagttgagagagtgcaggctggggtcaggacaggctgcggatgcttgtgcctatggggagttactccaacccacctattctgtctaatctccatggctttgcaccaaatcctccacccctccaattgggaggggactgttcaccaccttgtggtaagggacaacaccctaaggctggtgccagtagttatgagtagcctaccaccccctcccttacagtaacccccaccccttcaggatcagtcaagggaaagcactagaacccctgggtagggaaagaaaggagggaaaaaccataaaaggaatacttataatgtgaaggtttgtaaatagtccatratgatgtcgtggcagagtctgatttctatatagaggtgactttttttttaagtactgtgcaagctctgtgcttctataatgtgggaaatggcttggggaggatggcccctagcttaggaagactgttgtgttatttgttyaatttcaataaaatgatttgtagatcctgcacatgagagtggcatcctgtgggggctctgacacccagtgtctagactaccacctgggttcaataggtaggcctggcacaggactctggcaggccccctatgaccagcaaagcccaagagtaagtctgagcccagcctgtggccatcccaactgtggccagcaggtggctgtgtgttcacacagacctcactgcaggccccctgcagggtgggagggcactcatttatctgttgtgatccatgtggtggtgacccttggaatcagaaggccctgggatacttcactaaggattggccccacctgcctgatctaaggtgagagagtgtgacccaagatagttctggaatatctgtcttagctgtagcatcgccagctgatcctaagtggggtcatggcctgacccccatggacctcaaaggcccagctttaatggacagcagccagataggtgtccccacgcctttggcctactgccaggctcagcaacccaaactcatgtgcctcctctgaggcctgcctgcggacaccatgggagaatgagctcaggctgctgtttcagcaagcaaggctcggcccactagtattgcccctgctgtctgttgcccccatcttctcatcacctgcagcctgcccactgtggtcattctgcctgcacttctcaggggctgctataaggcagattctctactaggcttaggctttgactatcagtccaactcccagttaaagaggggagatttcagggacaggcttctgagtgtagggagctggtctgccagtctttcggaggtttgaacttgtcaaggctagggcaggatcaccatatccagcctggacttgcagttctgtggggtgcctccccatacccccataagatgccaaacatgaggccctgtcatcctccatggtccccctctactggctgttcaaggcccagggctctcccatgccagatagcatcctgtctcctaccaccactgtcccagcctgagggaactccctgtgctgggcctacccagctgaccccatcgctggaaacaatgggggtcaggcaacacttccccactctctcccgccgggctgtgctcacttccttcctgctggctgcctgaggaagtgtccctgccctgggacagtctggcctagcctttgtttccccgggggtccccacccatggagctttcaaggcttctggcccctgtgaagccagcacagtggtacagggacactgcaccttcccctaccatgtcttggactccttggtcctcagggccagactcctgggtattcacctacccctcacacagccttctgttgggggagaggctcctgggcattgggccattgggttgttgaggggttggctctgggtgatttgagggtaggtagatttgcacccctggagaggtctgctggaaccttgctgcagtcctccctagggccagccacaggaacacccctcccagaggagtatacccctttcctcatccatgttgtaaggagccccctactctgtatagtggactctgaaatccatccaggaatgaactccagcaggaaagcactctgcagaaccctcccagtccatcccctcctccccaacccacacagtcacactcactaacacattgtcctgtcacacaggatgcggaagctctcagtggaaaaaaacggactcagctactggaagtccccccgaccctccccccaaggctagttcccttcttgggcacctgctctgggggaccatcagctgaacgacccccaagtattttgactcccaaaagcaccaccacctgaccccatcctctcacaccctactggatttgaggatgggccccaatcctagggaaggagtgaagaggttccctagtgttggaagctgtgggtgtgggggagattggcacctgatcctgagcccatagccttcctgtcacctggcgcagctggcggggccagatcctactcgggaagggtggggagggcagccagccagcagggcattctggagggaaacagggtcaaggcgatctcctcccccacgcctgttcctggccctttcctctcagggggcagcaggaagtgaggagaaagggctgggatgggaggcgggagcggatgggagggaatggggtttatcaagtcctcggcgagctgcccaacgggcagcagctggcgcaagtagcctagctggagaggctcaccccaggaaggagggaggccaccgacctactgggccgacggactcccacacaggtgagcccagagcagacggctggtctgcacccccacagatgcgctcgcagttgcactccctccctctcctggcgcccgggagggttaggggctggtggtgcagacgcgggcccttttgggagttgagtctcgcacaagggagcggacctaggaagagccgaggtggtttcgcacggggctcgccagggtctaagcctgccccccaccgggagaggcctgtggagcgtagggggcgctggatacgggatggaggccctgggagacccctcttgctggctttctcggaggtccagccagaaactgctgcaaggaatggaggcctcctcggggttgagagggagccgggctcccaaaggacctcagagactgggcagaaaaggacgggatctcagggatgactgtcccgccctgatgcgagtcagggagaggggcggccaacctcctagacccctctgagcttccctgaccccaaccctgcggccacgccgcgacccagagccgggctgccaggataacgactgcctcggcccttcctgggccggctaagaagcggtgcttggccccttccctcagtctggcagggggcggggcctccctttagacggcggaccagagaagggggcccctgattcgtgggaggcggggcactactctccaggagaccagaggtcgcctcaggtcaaagtccctttttccacacaaaggggacccacggctggcgtctacgttagggggtgcagagccagatctggtgctgccccctgccaacctcggagtaccacagcacctcctgatggccgaacggggcaacgcctcctcctattcccccccccccccttcccgtccccctgccttgtccctcacactgtctctttaaagggctggcggcgccgcggagctgggaggactgaaccaccggcctcgggctgcaggggaaacatttcaggctgactggcgctcgtggctgagactcccatagaaagcccggctcagaggggcattagggtcctaaatgggcggccacgtccctctgcagaggacctggggctcttcgagcccgaaacgaggcaccggcaccgagaaaggtggaccacaccttcccgccccgtccgcaagtccaatcccgggcccacctccgcactggagtcttaaagggccagcgtgcctgggggcggagccagcagaggcgctgagccgggccgcgcctgggcgaacggccggagcgggctgggctgggcccgggatggcggtggccctggcgccggtcccggtggcgccccgcgcgaggtgagggcgggcggtgcaaacctggcggctctctccccttgggctggggtctgaatccccgggggtgctcgcggagaggcgtcccagaaaccccacccccacccgaccgggcgcaggccccacgtgtggggcgggggcggggtcccgcacaaagacccggcggagcgcgctctagccctgagcggccgggcgggggaggcgagcgcgcgcattcccggtggcggtggagggaagggccgggcggccggcgccgccgtgggaggtccgctgcccctttgtccctacggggcctcctccaagccgggagagtgtcagcgctcgagagaaagtccggagagcctcactcttctgccgggcgagtgttacacggatagaagcctcccggcagcgttccttccagtttcgtagcctcttgacgagctgttccctgctttacccaaatgctgtcgtttctctggatcaagggttcttcacggtgtacagggtgggcatcagctgttcagggttctctgaaaccatgtactggatggtatgcaggcatatatgtgactctggtgagcccaaattatctagttcttagaagggtcacagacctaatagagatttgtgccgagccacaggctacctgctccagaaaagagccctgtgcttctggcagtgagttcccagggtgccttgtctgccctgcagtggcctgtggtctctcaaacctattacagccatgagcacagtgcccccacacagcatgggctttgggagcatagatgggcttgaggtgggcacttccagtattccctagactgacttgttctccccaacccttcttccagttcctgagctggtgccaggcaggtgacacctcctgcagcccccagcatgcgggcaggcccaggccccaccgttacattggccctggtgctggcggtggcatgggccatggagctcaagcccacagcaccacccatcttcactggccggccctttgtggtagcgtgggacgtgcccacacaggactgtggcccacgcctcaaggtgccactggacctgaatgcctttgatgtgcaggcctcacctaatgagggttttgtgaaccagaatattaccatcttctaccgcgaccgtctaggcctgtatccacgcttcgattctgccggaaggtctgtgcatggtggtgtgccacagaatgtcagcctttgggcacaccggaagatgctgcagaaacgtgtggagcactacattcggacacaggagtctgcggggctggcggtcatcgactgggaggactggcgacctgtgtgggtgcgcaactggcaggacaaagatgtgtatcgccggttatcacgccagctagtggccagtcgtcaccctgactggcctccagaccgcatagtcaaacaggcacaatatgagtttgagttcgcagcacagcagttcatgctggagacactgcgttatgtcaaggcagtgcggccccggcacctctggggcttctacctctttcctgactgctacaatcatgattatgtgcagaactgggagagctacacaggccgctgccctgatgttgaggtggcccgcaatgaccagctggcctggctgtgggctgagagcacggccctcttcccgtctgtctacctggacgagacacttgcttcctcccgccatggccgcaactttgtgagcttccgtgttcaggaggcccttcgtgtggctcgcacccaccatgccaaccatgcactcccagtctacgtcttcacacgacccacctacagccgcaggctcacggggcttagtgaggtatgtgtctccagggccctgccttttttctccttccttgaggatccactgcacatttgggttatcaggggccactataggactatacctgtagtttattggctgctccacatcccctcaaatcattctgtctataacctgaaagggtgacatcattatccccatttttcagatgagaacaattgaggcacagcgatgctgagaagtttgcccaaagcttcccagcaaatccagagcagagctgggactggggcccaggccttctaactttggaatccatcctgatagctgcacctaggctcaagtgtgcccttggcttgggaaactgagccccaaaagtggggtggaaatggacttaaatgtttaaaaaggaagcaaaacaaatgagcctctgcctggacgtgaaatgggggttgagctgggagttcagcaggttgaatcaggctggggtctgccctccttgtctgttcctgtcaccctgtggtctcagtcttccccagtgaccatcccttttcctgcatagatggacctcatctctaccattggcgagagtgcggccctgggcgcagctggtgtcatcctctggggtgacgcggggtacaccacaagcacggtaagcgagacccagcctgccagagctcagtctatgggacagaca

SEQ ID NO: 97427 - DNA, 17187 bp, Homo sapiens
agttaaagctgtaaggagagaaccattgatatgtggcaaacggcctagtaaccacttcttcataattctaagacagtaaatatttatggcatatttattatacaaccagcattgttaagccactaagagtttaaaaacatactattaggctgggcacggtggcttatgcctgtaatcccagcactttgggaggccgaggcggctggatcacttgaggtcaggagttcgagaccagcctggccaacatggtgaaaccctgtttctactaaaaatacaaaaattagccaggcatggtggcatgtgccttgtagtcccagctacttgggacactgaggcagaataactgattgaacccatgaggcagaggttgcagtgagccgagttcgtgccactgcactccagcctgggtgacacagcagggctccatctcaaacaacaacaacaacaacaaacatactactagattaaaagttaaaatgccttgaacttgaaaagcaactatgattatgtttatccttgctgtggaattccaatcctgttgaataggtatgggatgaaatgagggagcatgctacataattaattacctgagatcaggtaggtagtcatcttgacagcaacaagatcaaaacctaacttttcagttctataaatcattttatccttgaacattctgccatcttattatgaatgcgtgtatgtgagtgttgaagaggtgagagtagcagaaaacttaaaaaataagtttttaagtttttgtttttgagtctgtagactcaaagcaaaaaaatcaaaatggaactgatgtagtttaaatggcctagtttgaaaaggagaattgagttgaatctcaaagaatgcttaaagatttgaatagatagagaaggcaatggaccagcatttatgtgataatcaaaacaatgttgtggtgggggtgaactgaatagagcgatgtttttttcttttcttttctttttttttttttttttgagacatggtcttgctctatcacccaggctggagtgcagtgacacagcaaacatggctcactgtagccttgacctcctgggctcaagtgatcctcttgccttagccttttgagtagttgggactacaggcacatactaccacatctggctaatttttgtatgttttggagagacagggtttttgccatgttgcccaggctggtcttgaactcctgagctgaagcaatccacctgccttggccttccaaagtgttgggattacaggagtgagccactgcacccaacctgtgatttttggattgtagtggaacagtcctgctattttgcagtgaacacaaggtaaagtcggattagattatggagggctttggaaatcaggtaaaagagtaaatttaatctcacaggcaataggaaaacattgcagataaaaagttattttgaaggaagtttgtttgtttttttgtttgtttttttgagaaagtctcgctctgtttagtggctgaactcaccacagatttggctatcctgggctcaagcagtcctcagcatcctgagtagttctacaggcatgcaccaacacacccaggtaattttttatttttttgtagagactgtgttgccctggctggtctcaaattcctgggctcaggcctgcctgagattctaggcatgagctagtgcacctggcctgaaagaagatttaatagaacgtaaagtagctgaatataggcaaaaagacgaatttcaggagtcctaaaatttagggggtcctaatttttgttattcaacttcaaacagagatatttattcagccctttccttaattgtgaaagaaaattatctcggggaatgctatattatccaattgtagcccagtccaaaggtgtggcagatttcacaagatgactaaccatgggcaaattttttgtttgcttttaatgtaactgattctgtcttgagattccgtttaaagagaagcttatttattttaccactctaaagcagcaattctcagggagttcctaaagtgaaagctatttctaataattctaagacgtaatttgtctttttcactcattctctcatgagtgtacaacagagtttaccagaggctacattctgtgcaatattgcaatagtctgaatgcaaagcagatgagaatccagcagatctatatggcttctattaaaccagttaaaacacttgtaaaaataaaaaagtgtcactctttatgctttttttttgttgttaaaaaagtacatagttatttttaattaaaaatgttacttatgctaacatgtgatgtgcttagtgtaaagggaacatgagagcaaaaagtttgagaacctctcctctaaagtgatactctcccatatctgataaaagaaaaaaattctactctgactttgcttatatttcttatgttgatactgactgctcatcgtagtgatgctagatggtttatattcctctcaattgctttctagcttatttacctctaattgccatggctgactttccaaataaagaggaatgatatttcttacctgcgacaaatagtttgttgcgagaggaagcgatctggaaggtctgaggttcctttcctcttcccgaagctgtgtagactgcagcaggtggcagccgctttagcagccagagttggcagccaggagggcaaaatgcactgggagacaattccttgctgactgtccaggcagtcgccaggggagcaaagggctcagcaagctggggagagaatgaggaagaaggtggagggaggagactgctgtcggcactccttgggcccgccttcaaacaggctctttcctagggcaatggaagtcgaaataaagtggcagaggatacgagtacttcttttaatgtaatatcactattttcatgaaatcttttcttccgtaaaagttggggctctgtgccttccaaaacctgtacctctttctgagtatctctttctgactttaagaaagcacctccttagtccattagaagcatcttcttttgtcatctgtctctcttcattttcagacttcctggtcacacttcagcacaaaactttttcttattttacaatgcggaataatcagtcctattggggtaattcctacaatgttacaacacttaaaatatttctaaaatgtaacattttaaaaaaaggaacattttgcaaatattttcttttactttataacctcattcaggacttccccttcctcccaagctcaatatggtgtcaaaggatagttgatacaggccattaagatttacttttcagtggaacaggagtccattttcataaaacttctttatctgctgtatcagatgcaagccacacggataccatcattagaattttatttaataatttttacactttctgcaacagaaagtaagcttggggagagggataccaaaattcaggtaagagggcaaatatttacttgcagtttccagtgttaaaactttctattcctggaatgatagcaaagactgacctaaaatatttgaaatacaatttaaggatacatatatttagggcttatgttcaacatgttaaaaaatagtcttataaaatgtaacgtttgaagagcagagtgtaaatatcacagtcttgaaaataattagtggaaacaaaatttcttagccatttttttcttgaacatgtgctaaactgtattactttgctaggaagggaattagcaaggtggcattttgtttttgtgttttgccagtacagagttgatataaaaacagaggggttcctagagtcagggaacaaaatgcttacataaacactactttttgttggtttgtttgttttaaaaacaagatagggttttcatttcgggaagtcataaaaacatcatgtccttcaacagtgattacaaaggaagtctgtggcagggtggctggaagtgcttggtgtggtgactatcagaagaaaaaaaatagtacctttaagaagtatatgataagaatacatacgtgactcaagttgaaatagtaagttttcaccttccaactgtagagtccaattgggccaattaacatgaaagcacgaagtgggatcaagtagtgatcagaagcagcacactaagcaagctctaattttaaatattccattgccagtgaattttctccagctgtaaagatgcagaatgtgtaatttacacattttgaagttttgggacaaacacttttttctttgatatagagcaacaaatgtctcagtgtcctttgtacttcatagagttgttttcaaagattaaatgagataatgatgacagccctttgaatattttaaagctctagataacaatatcatctcacttattcctacccatttagcttatgcaatggaagttaatatttaaaaaataaaataaaataaaatgtccatggtgttctcttaatctgatgaaagcatttatgcattaggtggaatcatttttcttggaaatattttaagaatcagatggacaaccacctgtttaaatatcatacagtgtgaaggctgtgagatgaattccatgagtatttcccagacccttgggtttaatgaaccattaaaaataataacagcaaccatgataataaggaggaggagataaacacagtggacaactctacattttaccaaggaaggacactaaaaatgtaagaatttttaatctttttatttcataaaacttatctcacctgtgccccccaaattaggaaggacatggtatcagaataaagcacagtcactttaaagtgaatatatttgacttgatgaaaactttatactgctgaagagtctgaaacaataaagataaaaattaaggcaaactaaaacttcattccttttcccttcattttaccacagagggtaaaaattcaacacagattgctattgttctgggacagtgtttgagactccttacttcgccatagttatctaggctagtattatgtggcctatatttcacaatattagcaactcagattaaacacattgagcgcttattttctaggaacttatttaaaacaaccggcttcttcacaaacagcaaataaatatacacacacagaatacttccaagacttaatgataactaacatttaatcaagcaaaaggaaaaaaaaaaccttagtaatgtatgtaaatgttaaatatagttctctaagatgtaagattttgtacctggagcttatggatgtgtgttattgacctttgtgttatgaggtaatttgcttttttttttcttccacatccactaactgggcgtaagcttggaatgtatatctttgaaattgcaggtcaaagcctccgcattaaagcacccgatgaggcaaagctacaattatgtgagccatgtgtgttatgcaacactttttgatagctgttgccaattagacttaacttattgacacacccggggaagaattttctaagaaggcgtgattctgaacgtttggttgcaccaaagaggaagagggggcagtaactgaggctctggatctaaaagccttgcttgtgggccaggggaacacgtgattaaagccttcctgcaaacagagcatctgcaaacgcagttttaaacccttcctgcaaacaaaccaagtaaattttactcgaaaagaggccgtggatgtgctattttgtgttcctttgctgagattctaagctgctgggacacacaccggccttgctttggcaagtcttccttgttctttcttgaccagtttcagattttttcctggttcaaacacacacagggtggcagggagagatttttgtttcacgagtattccaagtggaggggaaagagcgggagaaaaccgggaaaaagctgcctttccgtggggcctggctctgggaggctacggtggggaagttggggggggtggtggtgggagagctgtcacgtgactcgtgcaggggctgctgggagtgcggcgcgcttcccacctccacccccgaagtccgagcaccccgcgcccggggtcttcactccctcgcgttcgctgacgaggaaggtccccataccgcgaagtacattggccttggggtggggctggagggatgggcgcctgtgagaatgtgacggrctgtgacacaaggaagggtgcgaggatggaaacttyctctgaggggctctagtggggcggaaacaacagtagggaggaagtgcggaggggcggcgggaagtgagggaaaatggaggtgaaatggcctgaggggctaggatcgcgttgagaagagggagaagactagaaggagacagctgcatggggcagaggggacagtgcttagtaacagccaggtcactaagcctaagatggcagagccagggcagtggtcagtgtttggcacacgacgaagaccagcccgtccaccaggcctggatctgctgaggccttgagccatgacaggaaaacgaacttatttttgcagaaacagttacttgattataagttttcgtttgacataggtgcacagtgttacttggggagagaagagaagggggtgaaggggaaagggaaaattagaaggggaagggaagagagaaaaatctgcctgttggcttctctgaagtattttccaactcccaaggcaaagttagcactgctgtgcatgtgtagtattttctagatactattaatactattacagcacgtaaacttacatactataaaggtactggcaggaatggasacgtacgatacagaatttacttaacaagcatcwttcaaatttgttgttgctctttctgtcwtctatatatgcatattttataggactaatcaaacagatgtgttaaagttacccaaatcagcatcgtttctcaaaaacaacaaagtcaattgataacttgaatatggacagggctcccctcatctcaaagacacagagactatacccttccaggtttcaacatttggactcctagggaaaatcccttccgaatttatggaaaagtaaaagtaaaatttgaagctactttaaagtaaggttggacagtgggaataacctcagactcgagtgagatctcggttctaatttagctcagtcttactggtgtcacttgatccaccgtcactgtccctgttttctcacttgtaaaaaatgagattgaattagatgaactgtaagacctgtttaaacattaagattttgtgaagatagaagaatcctttttttttttttgaggtggagtctcgctctgttgcccaggctggagtgcaatggcacaatctcggctcactgcaacctccctctcctgggttcaagcgattctctcacctcagcttcccaagtagctgggattacaggcgyctgccaccacgcctggctaatgtttggatttttagtagacacagggtttcaccatgctggccaggctggtctcsaactcccgacctcaggtgatcttcctgcctcagcttcccaaagtgctgggattacagccgtgagccagcgcgcccggccgaagataraagaatcttaactgagccagtcctgaaacaaggcagaattgccagagagactcatttggctaagtacatagagaggagtagttgaaaatgatgggactagtaggcttgcaccagataatacrggaccttgaaggccatatcatggaatttcaacttattctggaacaatgaaagtttttgagttaaaggaatgcagtaatcaaagttttgaaagattacccaaatagcagttgatagaatgatttagaggagggagaaattgagtttaggaaagtgacagataatgacagtctaaattaacatcagcagtaggagtgggaaacagggaaggattccagagagcttgtagcatggagtttgtacctaaatctggcattgttctaagctttgtagctggtgccttcggaatatgatggcaaatcaccttgtaaagcctgataatagraattgcaagaggccaagagaattggaggtaagctgtatgcctrtggagccttaatcttttattctgttttacatactactcaaatttcttccctttaagaaagctctayagataagtgggatttaatgtattcgtatgcccagagctaggattgtcctacaacataggaggaactatgttgattccagctgctttttcactaagtataggcctccaagaaactattgggagatttctttttggtagcttgagatctagagacagaagtgagtctgtgcctttatgatccatargattttatgtaattattttgctgtgataagtaagataactaggtactatagttactgatctttttaaagagcacagtatcctgtcttttactactgcccccaccagttgatcttttgcatttgggacatgatttgctcccttgaagattatattatttagcaaaatttcacaagcatttggctactgtctaaattacagtttagcttcattgctatgaaaacatctactggttcaagataccagacgctttttcaacaggagtttaaaaccacatttaaagtctaatttaaggctgggcgcattggctcatgtctgtaatcctagtgctttgggaggctgaggcaggagtatcgtttgaggctaagagtttcagatcagcctgggcaacrctgcaatacattgtctctgaaaacaaaacaaaacaaaacaaaattagctgggcatggtggaatgttcctgtagtcctagctactcaggagtctgagacaggaggatcacttgaatctaggaggctacagtgagctaagattgtgtcactacactttggcctaggtgacagagcgagaacttgtcacaaaaacaaacaaatgaaaagcaaagtctagttgaaaaccaaaataaaatttaatatattgagcaaggtgtttcttgggcctgtaaatttccttaataataaaaactcaaatgactaagtcatatgctttctagcatgtttgcctttttctgaaaaatgttttatttgctttttcttaataaacaaaatgtatatgtcctgaagatcttattgactgtacctgytttctttattttgtcctgttagtctccagtgccagatagtccacagctgtcctctcttggaaaatcagattcatctttctctgaaatttccggactattttataaagatgaagccttggagaaagatttaaatggtgatgtataaaatgtttatatttctaaacatcagtcttataatgcagaaggtttgttatattttataacttaaatgatttttcttgaacagatgtgagcaaggaaattaatctaatgttgtctacctatgcaaagcttttaaggcaagtacttatagtatattctctggggtctttatgttagttttcttctggaaactctgtattgggaagtttaattctgtggctgccaaacctctccagtaattaaaactttggaattttttattctacctcagtcccttataatagattagttggttattttcagggaatagcgtcaacttttccactaaaaatcctttcttttttactcttgccaagctaatactagactgtatatatcttggtctgtaattagatgacattacattttaaattttatgtaaatacctctttgagaaaaatgtttgatgaaattaatgataacagactgatattaaagataaatatttatgtcatagagagtcagcctttcatatccatgaattctgaatctgtggattcaatcaaccacacattgaaaatatttggaaaaaaagggtggttgtgtctgtactgaacatgtacagacatttttttcttgtcattatttttcaaacaatacagtataacaactgtttacatagcatttacatggtattggtcttataagtaatcaagagataatttaaattatatggcagaatgttcttaggttatatgcaaatactatggcattttatataagggacttgaatatctatgagggatgttcctttggtatctgtgggggattctggaaccaataccccatggatactgagggatgactgtatttatattttacctatatctattttaagaccaaatttaaatactttattagcctaatatgttttatgaagtgttttttttacactgcyggacagtcattatacttggatagtggtttgtgtggctgtaaaaataatgtatgtaattgaatattagtgttataatgtataagatacacttcctgttgtgtcaggagacctttttgagtagtcaaaaatatttgtgggactaatttttttttctgaagagtattagtaaattaatgaagttctgtggcacataaagccatttaaatgaaatagttaacaaatattgtgtaatgaagaacaacataatgatgttgtttatatctacttagtttaatatacaactttttttcctattagtgagagagcagcagtagatgcatcttacattgatgagatagatgaactcttcaaagaagccaatgctattgaaaactttctaatacaaaaaagagagttcctgcgacagaggtttacagtgattgcaaacacattacacagataaaatatatacttgaaawaagctgagaatttaaacctattattgttataatgaaagaatgacatttatgctttgaaagctctcgagttgttaaagaaaatgtatatctcgaatagagaaggggaaactccttgaatttctaggtttaaaaaggaacttttaaattccttaatgttaatattaatgttcatgttaatgtcctaagctggccattaacatgaactacgtcacttttctttkgagggtcaaatatttagtgcattttatagaagtgtaaattatttaaatcttatgtggattcttttattttttccttaaacttcttagtgtttctgaaacttctaaaaaaggattcagttaatttataatgtttaataatattatacttttagratattttgtttaaatatcagatagttttggagataattttgaaattttttttatggtcaggattataaaagaagattaaaaccttagaggtgatttttccagtttcttagaatataatgacataactgtgtgctatttccatttgattattttcactattagttattatgtatgactaataaaagctctcggcttaaaattattttcttgtggtaaaagtagtaaaataaaaaccagaaattactcaccagaaccttgtatgagttggcttttttacacatcaaccacatcaacatgtgcagttaatgaattatatttagaaacattagcagcagtgtggtatgggataaagattagtgatccagaagtaaatagattggcttaaacaacaagatgactttgggaggtcacttcaatcgtattataattgagaaattgaatttggactggaggatctatactactcatctagctaaaaaaattatccctttaatgtgaagtactgctatgattttactgaaaactttctatgttatatattactatatgggatagctatattaaccagatttttaaacaaaatagcacccatttttcaatcatataggcagttcagtttattacatgtatatttttccaatataagcagtcagaaaattgcaaatagtactacagggaattgttattcctaagggagactgcacatttgccttgctgccttctaaactctaaaataaaatctcattttatcacattactattttaaggcataaacaccacatgatgtaaatactcatataagaaaagatgacaaaagtgaaataaaataatacttgctaaagaaaattggttaagtggaaaaaattattgggttgatagaggtggtggcacagaataggttggaggtcaacaaagtaattattagaaatgaatttttttcttttttgccacttgcagtggctcccatttctaatcctagctacttgagagactgaagtgggaggatggcttgagcccaggaatccgaagctgccgtgagctatgattgcatcactgcactctagcctgggtgacagagtgacactctctctaaaaaaagaaggaaaggaaattttttcaattttttctttctttcctttgctttttttttttgagacagaatcttgctctgttacctaggctgaagtgcagtggtgcgatcttggctcactacaacctttgcctcttgggttcaagtgattctcctgcctcggcctcctgagtagctgggattacaggcgcctgccaccacacccggctaatttttgtatttttagtagagacggggttttgccatgttggccaggctggtctcgaactcctgacctcaggtgacccacccacctcagcctcccaaaatgctgagattacaggcatgagccactcgcccggccaaaaggaaattttttaaaactaaatacaacaagaagatttgtgagttaatacgacatgtcatctggatttcgacctaccatcattaagaaatgttctttttctaagcatttattactaatatgaaaaataaggccaacagattgtttgagactagatttcataatatacttgttatatcctgatggtatcaccattgtttaacatctagttcttccctttgcaggttcagaaaattgatttgatcatttcatttgatatgattaagactggagaactgattttaagtcacaatgtgtttactgttcagcactgttcagaattgttataccttgtagtataaaggtgcctgaaagcctaatcatgaaggcttatttatttatttttttattgatcattcttgggtgtcgaaggcttattttttaaatcaaatttggatggctttggtaccatccacgtagacaagagtaattatcttggccaggcatggtggctcacacctgtaatcccagcagtttgaaaggctgaggcaggcagatcacttgaggtcaagagttcgagaccagcctggccaacgtggcaaaaccctgtctctaataaaaattaaaaaaagtagctgggtatggtggcgtacacctgtagtcccagctactcaggaggctgagataggagaatcacttgaacccgggacacagaggttgcagtgaaccgagattgtgccactctactccagcctgggtgacagagtgagactctgtctcagaaaataataataattattattatctcacaactggagaaatgctattgcaggaatactattgccctttaatttacacttctaatgttactctttactatttcaataaaatatcacaaatttataagttatttttcattgattactaatcaaaatatataccgaactatcttcgtactctgctatatgtattaagacactcccttctgacaattttaaccacttctttcttgaaatacaattttgctaggaaaacatgatatgttaatgttaaaagcaactctgtggcagtgctgtgggagttactagaagaccttttggtaagggagtcagagaggtagattttaaattggatttttgaaaaggaaaggggatatttcaggcaggggaaaagtttcttcagtggcacagaagaacaaacgtatcatggtatgttagtcactttgctgggatgataattcatgaaggggaatagtgtatggtctaaactggagagcagggacaatcttgtttcttggtattcttactttgtagcacagtatttgctacattggtgctaaaaatgttaataaagtcatatacattttaagggcatactttcactcatgctagattgtcagaaaatgttctgtaaaattaatgaatagaaaagaaaaggaaggatgaagtgatttaaaggcagagaaaaaggatgaaaggtaaattgttgccagattgtagcgtcctctagtggcagtctaaattcggactttattctgtgtcggaatcttccagaagaggagtggcataaaaaaattgatgctgtgcatcaggataaacggacttaactgtagtgtgagaacaggtttgaaaaagaaaagtttagggcgggggagaccactattggtggtctaattttaatatttcaaacagctgcgtattatagctagggtgtttggacggttgtcatggaaataagccccgccccttaagctgcgtcctctctttgacctgtcagtgagggagggacagtccaggcagttctgtgcgtgttcactgtttagtagtactcaaaactgccagtgtgagaggatttggaaatcactggatctgctcaatacaaaaatgttttttcgagtctttctccattttatcaggagtcattctgccactgcagtggatttccttcctgtgatggtgcaccggctcccaggtagagggtttgcccctttctcttcctcatcctcctcttcttgccagtctgcgcttagaattctgtgcctctttcctgaaggttgctgggagcttctgaagctttgtgtcctgtgtggctcagatgagatagcaattccgcagagtcctggaagttaaagaaggctgagttaggattgtttcctcatggtcagggaaacagccttcacatttgtatattttatgcaatatttaaggcaggattcagggacttggtattctttgggatttgcaataagaagaatattcaatatttaggcttttctaaattgaaaaatcactgccacacgttctaatgtaattgtttggtttctctatttgcattttgcggggactgccttaaaactcatttatgttttatagccttctattatagttaccattgttacatgattttatgtatagaaattggctgatctagagctttcagaaatcatactaatatgcactataaattttaaaattacttaatgtagtaatttaatgtttgcagtatgcaagggaatgtattacgtactggaaggagagaggagacaaacaccagaccctgtactcaaggagtactggtagtatcatttatcatacaagacagataagataaggtccatatgagagctataaacagatgctgtgagttcagactaaggagaatcagttcttgctgtaggtaaggggaatgctgtgtttataaagcaaatgacatggcaactggatcttgaaggatgagttaggtgagtaaatttcatctgaaggagttgggaaatatcctagatgaagaaaattgattggcgggggggggggggaattaaacattctattttgacatgttgaaagtcacctgcaagaagtaattgatgaaattaagagactagatgagattgccaagggagagtgctgagattaaagatccaaggtaggaccttaggaacattcatgaagtggtaagggggataaggagcccataaagggaattaacatttggaaagcatccactatctttatatttgattatgacaacagacataaacaggaagtattaacctccttttatttccattttatcatggaaaaacctgaggctcagagacattaagtaacttgcccaaggttgtcagctaataagtaataaaactagcagaatgcagagagtagttatagggcagcaggaaagttagaataggacaatgtctcagaagctacgaatagaaaggagtttaagaaagtgttaatgtcaaattctatggaaactttgaagagcatgtagcagattaccagtagcatgcaatagagtatacaacatatagacatgtaaatattttctacaatgtaaaatgctttaaatttgtgtatctctacttagacaaatgcccaatcaggccattcaatttacttaaaaaagtaagatgagtaaaattacatacctgaccttagggaatttattttaatctgagaataagataaatggtgcataatgttaataaaagtagagtaacataaatacctgagagtttccttctctatcttttcaaagcatcctctttgtacttctgatactgtagttcccagattttagtatgcttaagaatacctgcttgtccttccccagagattctgatttattaggaccagaatggagtccaggaaactgcattttagcagtaacaccaggtatttctgttgcaagtagtcctcataccagactctgagaaacaatgctgaaataaaacacagtgtcagtgatctgtttactaggcagtcagttcttttatttcaggattctaatgctttttattctcagcagtaccaagtacttcgtcaactgaataaaataaaggagatattacaccttattggactgatcattaaaagctatgtaaatataataatagcattttttgagtattctgttctaaaagctttacataaactaactcatttattacttatagccttagaagtaatatgaattatcatcatcaccatcttagaaaagaggaaacagaccacagagaggtgataagtgcctttctcaagccttcttatttaggagagggcatatttgaaaccaaccagtctggagccaggtagagccccagctcacacccttaaatattacactgtgctgcctcttaagggaagtactgtaacactggagatagaccttgaccaattaatggaatttgctttttttttttttttttgagacgaagtttcgctcttgttgcccaggctggagtgcagtgctgcgatctcggctcactgcaacctttgtctcctgggttcaagcgattctcctgcctcagctcctgagtagctgggattacaggggtcggccaacacacccggctattttttttttttgtatttttagtaaagatgggctttcattatgttggccagacaggtctcgaactcctgacctcaggtgatccacctgccttggcctcccaaagtgctgggattacagacttgaaccaccgtgccccgctggaattttcttagaactagagaaaaggacattgggaaagacattcagggtgaaagagaattttatttgaaaaatcagtaaagaattaggtttgactcatttgttacatgtcatataggggagtagaatgtctcgtgtgcttcaagctgaatttttgaaagatttgaaagaaatgggatagtaacaacttgctaaaagaatgcaaatctcacttcttcagagtaatagtgtccctatatgttagctcatttttctagcctagatttctgaatcactcttaaacttttatgagataaagaattctattttatagcacttaattatttatttgaccacccctc

SEQ ID NO: 97428 - DNA, 80209 bp, Homo sapiens
tgctgcctcagcctcccaagtagctgggactgcaggtgtgcaccatcatgcccagctaatctttctttccttgtttttttttttttcagagacaaggtcttgctctgtcacccaggctggagaccctggcttactgcaagcttcaacctcctgggctcaagcgatcctcccatttcagcctcccaagtagctgggacttcaggtacacaccaccacacctggttaatttttgtatatatatattttttaatagagatggttctcattttgttgtccagacaacaaagaacgcctgggctcaagggatccttctgtcttggcctcgcaaagcactgggattacaagtgtgagtcactgcaccttgccatttcaacatccaataagaagtgataacaaaaaattactttcagtgcgtctggtggtagaataataccccttaatacacattacaagagatcattaaataaactgaattctatcttaatattagtgtttcctctgctctcacaccccaatcatcaacacacaagatttctgtgaccaaatgtgggggttcttcccccagcacaccaaatattggacaccagttgggtatcttctgatttaattctgacattacctacctggagatagtgtcagattctatatgttgggggctcagtccctaagatttccctcctcacttagacaccagttgcaagtccaggcctccactggcttcaagttggggttcccacaccctccactttgggtttgcttaatttgctagagcaactcacaaacctcagagaaatacttagttatctttgcacatttattataaaggatactgcgaagaatatacttgaagagatgtgttagctacaggaccttcacctgttgaggtattaggaggctctccaaaccccatcctcttgggtttttatgtaggcttcatcacgtaggcattattgtacttactcctaattcaactctaaattctgccaattgtcccaatttcctatcagtacacagtcagtctctccagtcatcagctatactatcaatatcatcttggagaattctctcctggaatctgccctgattattctctaatcttggtagacagctagctttctgggatcgctcttcatcatcattctggagatttccttcttgtctgaatctccagctttatttcatgtcttcctcttttttttgttgttattttttagtgaccacgcttatattggtgaagcctaacctccagagcttcctgaaagagcacaaggaagaaaaagaatgtttttccattttgcatgtataaaacacggttagactattcctcatccttgatgcatagctctgctgggtatcaaattcttggttagaagtgtgggggccatagggggttgggcaccctaaaggtttagtgaagaatcacgcccacctcagcctcctgagtagctgggattacaggcatgcactaccaggtccagctaatttttgtgtttttaatagagatgagatttgaccatgttggccaggctggtcttgaactcctggcctcatgtgattcaccagcctcggcttcccaaagtgctgggattccaggcgtgggccactgagcctggccatccctctgctttttttatttctccttctgggacccctattatttgtctctagaatcttctgacccggtatggtaaatttctcatttttttctatttttctatatcttcatgtttttgtactattttctgaaagatttaccttaattctcatttttttaacttcttctctctttttttttttttttttgctatcaatcacccagtgctttgggcgaccaaagtgggaggatggcttgacgcctggagtttgagactagcttgggcaacatagtgagactccatctctacaaaagcagttttaaaattggccaggcatggtggtgcatgcctgtaatcttagctactcaggaggctgaggcaggaggatggcttgagcctaggagttcgaggctgcagtgagctatgatggtgccactgcactccagcctgggctacagatcaagaccttgtcttaagaaaaaaacaaaaaaaagaataggtataaaatgaatgaaggcaaagaatgtgggtggggcttataatgtagggtgatgtgagtggatttcatttggaaacctagatttatttatttatttatttatttatttatttatttatttatttatttgaggcagggtctcgctctgtcacccaggctgtagtgcagtggcacaatacagcctcaaacttctgggctcaagtgatcctcccgcctcagcctttaaagtatctgggactgcagctgcacaccctcatgcctggctaatgtctttaatttccttgtggtagtcagactttccatagatggatctcccaattcctgtcttaaggattctgtcgttggagccactgtcatatactcatataagaaaagaagagaagtgggcgagggtcccagcatccagtttgctgtattcaattaatcctcacgtttcctgtatactcccatgctcaactgtgtatcatatcttctcagtctagacagacactctttgttttaccctttccagagaataaatccccaaagcctgctggtgtggtgagatgtacacacttggttgcaagaagttgagaaaaggatctggggatttggcctgttctgaaccagcatttcaagcaatcctccttgtttcaaccatactctcacactttatggaggtacctggtgctgctaatcctgagcatttggggattctgtattgcaaactgggctgctcaatggcttttctcattgctggtttagaattcagcttccttgaagttgcaaaatcctttcccacttgtccatttgcctttccaaaattttactaattttgtctctcctgtcctggctatcctagtactttatgccttaaaaaaaaattctgttattttcaggagacagcaaaaacagattaaagtagatactgaaccatagttcaatatcctatctctactccacacatttgtattttcaaataattttctacagcttctttttttgcatgggaaatgcacactaaggaaactgaaaaaagacatgtacaatgtaaactaacaataaaattcaaagcctctcaactgactgaaggcacactttctttccttttctttctttcttttttttttttttgagatggagtttcgctcttgttgcccaggctggagtgcagtggtgcgatcttggctcactacacactttcttggctaacgggaccccagagtaaccttgaaaactgagttctgggccaagagtagatagagcgtcagatacaactctatacctcctctcttgctaaccacaattaggctttgttctataagggcttaagggaaaccagccctttcaaaagattctaccactgatatcaaccaaccccctgatgctgcccctccttttgtgcctgataagagatcacagaccacagaatggttctggccagtctactgagaatgcacagtaagggtttttctgtcctctgcttcaccttttgatataagagggccaaaaactccatcctgtgattgtggtaacaccgccattttttgtgcatggtacccatgaagctcaattactcatgggtactttcctcctttcataaatattcatgagtcatcctacagcttactgaatatgtatatttggccaccttcctcagcataaattcctgttccctttgcccctccctggaagtgtcagtttctggcttctggcctgcggctacacttctcagccagtcagaatggctgctctacagtctgaaaccattcatgagaaagagttctcctttctaaattatgaacttctcattcttcagctgacagaccataactgcagatccatctgaatgtatgaggaaaatgcctttcctttcaatgtcaactctgcaatattaaggacaatataacaccattattctaacattccctttaaatcattagtgaaactagtttggattatactagcatgctattattggtggttctaatttaatgattaatctgtgaaatagcaaacattgcataaaagcatgtatttcaggcaaatttccccttttgttgccaaatttggcctcagtatgcttaggatatagggaggaggcatttctctcattacctgggaacatgaattcacttcttagcaaatatttgttgacaaatggcttctgcaagaccctgatggtatcaggaggtgactctgagttttctgagaggtcagtagaaagtatctgatttatattgggtacagaaaagcaaaagaatgttgcagttttctcattttcattcagaaactctggaacctaaattcaaggcttcataaagcagttctctacttaaaagagaagcataatctttatcagagttccacagcagcctggagtagcacaactctattcctttcacacaaacttgaactgtctaacaaaatcatgcacataacttaatcatgtcttagttgtttgtttttgagacagggtctctctctatcccccaggctggagtgcagtggtgtaatgacacttccgtctccaacactggggctcaagcgatcctctcacttcaacctcctgagtacctgggactataagggtgcaccaccatgcctggctaatttttaaatattttgtagagacagggtcttgctatgttacccaggctggtctcaaactcctgggctcaacgtcttagctgttctaacagtttctcagcatggactccacttgtatacatcatttctagagaaataaagtttatttctataatacaaaaaaagtgcacattacaagaattaaggaagggaaatttcacaataatttctgcccacaaacaaagtcctcaagttgttctagtctccattctcaccttttcaaaagcttctgctatagttttgtttttaaatttcataaaattgagaagaaactttcctaaggtgcacacatcttaaaagagtatgactcggtgaattttttacatatacatacacctgtgtaaccaccgcagagcaagacagaatatttacagcaccccagtttcccacatcaccagggatcactcactatttggcagtacttattttttcccaaaaatcactaatacaccaggctggggaaaaaaccgagagtccgtttctataaaaaaaaatttgaaaaattagccaagcgtggtgcagcgagcctgtagtcccagttactgaggaggctggggcgggaagatcacttgagcccaggagttccaggttacagtgagctatgattgtgccactgcacgctagcatgggcgacagagggagaccctgtctctaaaagaaaaaagaaaaaaaaataattaaaacacaccagtgctttggaagcactttaaatcctggacattggattcaggtcatttactgtccgacctcgttattcccagtttccgcttctgccctgaaccccacttcacagggctgattgctaggctgtctacgcttgtaagaattcctgggagccctagcacgggcgcatacactcctagcaaatcgttccctttctcacccgcaccctccgcgcccgagtgagcctacctcgcttacagctggttgccggccattgcctccgccaccaatgacgtccccaggggcgggtacgcctccgcttccacctccgccacttctccgcgccccgcctccgcccgcgccccgcctctttcccgcgccccgcctctttcccgcgccccgcctcagttcccgccccctctcccggcgccccgtctccactcccgccccgtacctcgttgcacagactccacccacttccccaagcgccggggtttgcgcagcggcggaaatgggcagggcggagcgagcgctgcggctaaagcgaaggcggggaccctacccatccctagtcctgtcggctcctcccaccccgggtcacgccgtgacaggggcggaagcggcggcggcggcggcggccgagaagaggctggggctcgcggcgcggctgcagccgtcctgtgcgcgcggcgcgcggctccggagaggcgcccgcagtccagggcggcgcgcaccgcctcgctggcgctcagaggtgggaggctccccactccgggggcgtgcgtgggggccgtggcggatttcgggtgacagcgttgcacaaagcagcttggttggggtgcaagccctccctttccccctgtgcagcgcccctcgccgtggtgggaggtgggcgggtgccccagggacggatacctcctgccccggattaaaagagggtgcggggtgggtatctgtctgaagaaggggraattcccgggctagggtgttggggcgtggggtcgccgggttcgtcgcgatgttgccggtcggctaacccccctacaatgtttcctttctgtacagcggtgccttttccccgagactcccggcacctcttcagcgcaaaggtgagccccggggcagttgcttctccgacttcgaaaagcttccgaaagcttctcggaaagcgaggcggctgcagctggcaccgggagtttggggctccctcctggggactgtcagagccgcgggagaaccccacggtcctggagtaggaactccctcgcttgttcttcccggccgatagggtgcggccaggagcccgcacrgccttgcaggtgttgtagtaattctctggcacagccaccacgcgttgagacttgatgagcattgccaggttgctggggtaactcctctgggattggagacctggaggaggggtggcccgattagggtagctgttagtcaacggccgggcagctgacaggtgaaagaggaaggaagaggccgacccagctgtagaaagttggggttcagtgatgtggaaaccagccacatagaagtccagtcttcccttgggtaagcctgcaggactccccagtccactccagttggggaatcccccacaccacgtatacacacataactcaaggctttgaccagttttgttttgtgtttttaaatctattttagtggcagaaaggcgagtgggagagaaggcttcttcaggaggtacatgagaaaattaccatcaataattatttgccttgctgggagaatcaacaaaagatatctaggcaattggggatttaatattgaatcattgaactgcatgttgaatattgaataattcaatattgaattattcaatattgggaggccgaggtgggcgatcacttgaggtcaggagtacttcaagaccagcctggccaaggtggtgaaacctggtctctactaaaaatacaaaaattagccggacgtggtggcacacacctgtaatcccagctactcgggaggctgaggcagaagaatmgcttgaacccaggaggtggatgttgtagtgagccgagatcgcaccactgtactccagcmtgagccacggaggaagactccgtctcaaaaaaaagaaaaaatctttttgaataagctgcttcagaaaaacctagggattattataatgaaatctacatattgatatatccacttatatatttaccaaaaaatcccacttttttatcacattaaaagaaaaccaaagccaaattttaaatgcttgaattaaaaattagaaatatatgtataatgttgagcatgaaaccaattggttatatttaggtgtgtttattaatttgaaaaatcaagaaggaagacattttagtatactaaaaattttttcttcattttaagacctaaggacccagcaagtggagatatataaattacatcaagtgccaaaagttctgagaatggattcatataaccctcaattgtataaagttgaaaatatgctatcataaaaaccctcgataagatttaataatggcttttatagctcatgttttcatttccttgttaaccatttcttgaattctttgttgcattaagtacctattttctagtattcagttagattaaaatgtttgatgaaatttcaggaaactatactttcttttgagaatgcataccttcccaggtgacagggtcaaatgttgcatgaacctaggctgattcatttatgttcctaaaccacacatttgacttcagatatttttgctataatacttacatatactatacatttacaaatactatatatttacatatatttgtggttcatgttatgaataatgtcaggtatattttatatataaatgaagwgatttgtatatttatgtatataataattaatatttatatgtgtctatgaagagatttgttrgagtggacagccttttgaaaataaagtccaaaaagccttctttgggtataacaattataggtagatagtccttttttttttttttttttttttgagatggagtctcactctgttgccgaggctggagtgcagtggtgtgatctcggctcactgcaagctccgcctgcggggttcatgccattctcctgcctcagcctcccgaatagctgggactacaggtgcccgccaccacccccggctaatttttttgtatttttaggagagatggggtttcaccgtgttagccaggatggtctygatctcctgatgtcgtgatccgcccacctcagcctcccaaagtgctgggattacaggcgtgagccaccgcgctggccggtggatagtactttgaacatcattagcattttctccaacagtatgatagatgttgtagaactaaatggcagtttatttaatgcttaaagaactatagtgcatttcagaatatgtagggattatgtgttcacagctaacataatatttattgtttctgagaaagtgaagattaagtcaaaggaggccgggcgatagagtgagactccttcacaaaaaaaaaaaaaaaaaaaaagtcaaaggaaaatcatccgtaacattgatgttaggatgtgtcaaagtcaatgtagatggcaaaatgagtttttccataggatgttaataatccatgaaaagtactcttatgaatgttaatacagctcacaaatatgaaacaataggattacaagctccttaaagcttttctccaagactaagattatatatctggaatttgtattttatggttccacttttccactttcaaattctttatccataggtatgtcctatttatttttcatttatcattttctgtgtgtatgtgtagttaaatccaatagatcaaggaaggagatgaatgataattatagattctgtatattactgagtacttatgctaagcatttttcattccttaatctaattgaaaaaaattctgttagctcttaatctttcatagctgctacacattatttctcttgtagactttggttcttaatatatgtttaaccatgctgttattggactagtttgggaaattttttccagtagaagataccagtgcttctatctaatttagatctgtatattcagtagtgactagatggttttcttgawatttatttgttgagttgtactgaaaaggaatgaatgagttttcttttattttttttgagatggagtcttgctctgttgcccaggctggagtgcagtagcacaatctcggctcactgcaacctccgcctccctggttcaggcgattctcctgccccagcctcctgagtagctggaattacaggcacgcgcctccatgcctggctaatttttgtatttttagtacagacggggtttcacaatgttggtcagactggtctcgaactcctgacctcatgatccgcctgcctgggccttgcaaagtgctgggattacaagcatgaaccactgtgcccagccatgagttttctttttaaagtgtaataagagatcaaagtgcaggaactgctaagaagacacagtaaaatggagaggaacataggcaaaactaggtggttttcctcattgaattttataaacatagtgtggtttgtttattggtcattcatgtggcatgtttctcattttgtatcttttaatgtgcataactactaataggtaatgtttattgagtacttacgatatgccagttttggtgctttaaataggttatcttgtttaaacttcatgccagtgctatagtaaatgcttatggtgcccattttatgtgtgagaacactgaggcttagagaggttaagaacttgaaaatggtggcttgagccaggtggtgtggtgacgtgcacctgtattcccaactacttggagctgaggtgggagaatcgcttgagcccaggagttccaggctagtctgggcaacatggcaagaatgtctcaaaagaaaagaaagaaaactgtagctttgtatttaggcaatctgacatacattcttacctaccaaagtgtataataacttgctccagactgttaaaaatatttgcagatgctaatatttaatggtctgatttttcttttgcagattatttaatgtaatggcaactccacgggggaggacaaagaaaaaagcatcttttgatcattctccggatagccttcctttgaggagctccggtaggcaggtagtgttcatttattcattcaacaagccttttttgagcatgcagaattactgattgggactggagaattagagttgaaaagattactccagccctcaagttgcttgtattctaggggagaaattctcagtacggtcataacacagtgtgataacatgatagaatatacaaaatagaagcattatctggcagagggaactgtaagtataaaggcgtagagtgtgaatcagcataggatgttcagagattcacggctgtgtggttgcttccagagtgtgaggctggggccagatcatgcctggcttggatgtcattcataggaatttggacttcagcttggaattggttgaatgctattggagggttatgtatagggctttttgggtagggcttttattcttttaaaagaaaaaattgaacaatgtaattctttctctataatttttctagctttttatttaaaatagagggggccaggcacggtggcttacaccacctgcaatcccagcactttgggagtccgaggccggtggatcacaaggtcaggagatccagaccattctggctaacatggtgaaaccccgtctctactaaatatgcaaaaaattagctgggtgtggtggcgggcgcctgtagtctcagctactcgggaggctgaggcaggagaatggcgtgaacctgggaggtggagcttgcagtgagcagagatggygccactgcaytgcagcctgggcgacagagtgagactctgtctcaaaaaaaaaaatagagggtataactgctctaaataaagaaaaaacaaatckcaatttggggaatgacttttttttttttgactcatgtcacttttttttttttttttccagacaatctcctctatcccccaggctggagtacagtgacacaatcgtgtgtgccacaatgcctggttgatttttttttatttttagtagagaggaggtctcggtatgttgcccaggctggtcttggactcctgagcttaagtgatccttccacctcagccacccaaagtgctggggattacaggcatgagccaccacacccagctgatgtcacttttttctaagaaagactcatatgaatttagttctttgcttagacatctgttgttaaaatgctatttctatatctctagcaagttagtaaattacttgcacaatgcagtcaccaggaaattgctgtattgtcatccctaacctactgccatgatgtttttgaccttcatgtttagaactcagctgtgatttcagtagtgaaccttcatccttagtcattttgccatcatcagtgaaattttaacatcagctgtgactcccttaggcgaaraagaaagcaacagagacaacagatgaggatgaagatggtggctcagagaagaartacaggaaatgtgaaaaggcaggctgtacggcaacatgtcctgtgtgctttgcaagtgcttctgaaaggtctgtttagatgtgtgtcttggcctcccatttctgcttgtgagaagttctttgtggaaacatcatccttgtagatagttttcctaaagatagatacagatactataagtcatctaatctaataatagagayattgcccagacattctgtacacaccacaccctcctcaaggccctccctacttatccctagcctactgggagaggccacacccatgtcaattttgcaacacagtgtcctcaaatccarccaaccatatctacctctccaagggttgagggtgggatggtgtatgtcgtggtgagacagtagagagaactcatgagctttctgtagacaccagtgtttgtttacttttcgttgtgtttttctctctcatataacatgccacctcttcccatacgcacatacaggtctcatagaaactacagctaactgcagccttgccatttttattgtggggtgacacaagtatgatcttctttttttttttcttttttacttccagaggaaaatattcaattaagggttaaggttcaataamatcgagaaaacaaatcctatttgtttttaaacacaaagagggccaggcatggtggcatgcgcctgtaatcccagcactttgrgagaccaagatgggcggatcagttgaggtcagragttccagaccagcctggccaacatggtgaaaccctgtctctactaaaaatacacaaattagctgggcacggtggcagaagcctgtaatcccagccactcaggaggctgaggcatgagaatcgcttgaacccaggaggcagaggttgcaatgagcctgagatcgtgccactgtactccagcctgagtgacagagcaagactccatctcaaataaataaaaaaatattaaaaataaacacaaagacgtggtgatcgtgttcatagtggcatgatttttcattctcttgctatattatcaactgtttgacaagttatctttgccaaattgcctgcttgatgttcagatttcagctgaccagattccctcgctgttcagtactgggccccacgttattctctcatgtccacatatgcagcctgcagcaagcacagtggcatctgtccttttgtgtcataaaaccctatcattgccccaaggagtcttcttaagactgctaagccccaggcagccagctaggttaggtcccatggcctaagtccctgcatccttcctgtgtgttattatctactagtaatccattcctgtttcccctgtccttaaggggctaagtggagataatgcaaaatgggttcatagatggtgcttgcaagatgttttttaaaaaatgggaggagaaatgtttattcattaccaaagctatatgtttttcactattttcagatgtgccaaaaatggctacacctcccgatggtatcatctctcctgtggggaacatttctgtaatgaatgctttgaccattactacagaaggtatgttcactaattgtgtgaggtttccctggagaaggggaccgtggcaggggcagtgcgtgtggtcagctgattaaagcttagtctcgaggcttactgaattattcagctctttcagccatgcctgtgatgactgtaacttggacgagaactttgatgttgtagtttgtgtgcatgtttgtgtgtgtgcacactcagggatcaaaaaatatctgccatttcttttttttttttttttgaggcaagagtcttgcctaggctggagtgtagagacataatttcagcttactgcaacctccaacttctgggttccttaatagagatggggtctcgccatgttgtccaggctggtctcaaactyctgggctcaaacgatctgcctgccttggcctcccaaagtgctgggattacaggcgtgagccactgcacccagcgaaacagttatttcttgagtcaaagttctggaacatctaggagatgttgattctattttattgttttcgatttcatttgtgctctaatttttattttttacttgtgtttgctttaggtttaattttttatttctctagtttcataaattagtagcttcaattatttatttttagatctttcttcttttccaataaatgygtttttaaatgccataaatttctgtccaagtaggttgtgatatttcacaaattttgacaacttttattttaatttagttcaaaatatttttaaatttccattgagttttcctttttgatctatagattatttagaagtaaattgtttaatttacaaatatttgggacacctccagcaatttttctgttactgatttctagtttagttcagcaatggtctgagaatatactttgtatgatttctacgttttaaatttgtcaaagtttgctttatggcccgtaatgyagtgtatcttggtaaatgtcctgcatgcagtggagaaaaatgtgtattttgctattgtcaggtgggtctatcagtgtcaactagaccaagttgattgatagtgcagttcaggtcatatatatatatacacacacatacatacatctttctgatttactcctacctgatctttcagttactaagaaaagtgtcttaaagtctgcaattataattgtctcttaacatttccaactataatgcagatatgyctatttttcctttcagttctatatatttttacctcatgtattttttttcttgagatggagtctcgctctgttgcccaggctggagtgcagtggtgcgatctggactcactgtaacttccacctcctgagttcaagccattcttctgccttagccttccaagtagctgggattacaggcgtgcactaccgcacctggctgatttttgtattgttaatagagacaggasttcatcatgttggtatggctggccttgaattcctgaccttgggtgatctgcctgcctcagcctcccaaagtgctgggattatagcactttggtggtagctcgagccaccacgcctggccgtcatgtatttttaagctctgttgttaacattgtacatctaacattgttgtggattctctcaaaattgacccctttgtgtaatatcccttgtcttatccctgataatattcattattcacataaatatggctgcctcagcttttttaatgttagcatgatacacctttctttgtttctttactttttacctttctgagtctttgtatttagagtaggtttcttttcttttcttttgagacagggtcttgctctggagtgcagtggcgtgatcttggctcactgcaacttccgcctcctgggttcawgtgattctcgtgcctcagcctcctgagtagctgggattacaggtgtgcgccaccawgcccagctaatttttgtatttttagtagaggctgggtttccccatgttggccaggctggtctcaaactcctggcctcatgtgatcctcccaccttgtcctcccaaagtgctgggattacaggtgtgaggctccatgcccggcctagaggagatttctcatttacacttatagtttttttgtaatcccactgacaatctcttttaatctgtatgtttatgctattcatgttttaagtgattgttgatataactggattaaaatatcttgctagctgttttccatatggtgcattttattctttttccccttcctctgccttctctgatttttttttttttttttttttttttgagacagaatcttactctgtcccccaggctggagtgcagtggcgtaatctcggctcactgcaagctctgcctcccaagttcacaccattctgcctcagcctcccaagtagctgggactayaggcacccgctaccacacctggctaattttttgtatttttagtagagacggggtttcactgtgttagccaggatggtctcgatctcctgacctggtgatctgcccgccttggcctcccaaagtgctgggattacaggcgtgagccaccgtaccccgccgccttctctgattttaattgagcatttttatgattgtattgtatttcatctactgatgtaatttttaatggctgccctaggatttactacatacattaaaaaaatattctaggctaggtgcagtggctcacgcctataatcccagcactttggaaggttgaggtgggcagatctcttgaggttaggagttcgggaccagcctggccaacatgacgaaaccccatctctactaaaaatacaaaagttagccaggcatggtggcaggtgcctttaatcccagctatttggaggttgaggcataagaatcccttgaacccaggaggtggaggttgcagtgagccaagattgcgccattgcgctgcagcctgggtgacagagtgagactccatctcaaaagaaatttaaaaaaataataamaaaataaaaatattcggaactggttccagctacttgggagcctgaggcagaaggatcgcttgagcttgggagttcgaggttgcagcacaccatgattcatgattgcagctgtgaacagtcactgtactccagcctgagcaacatagcaacaccctgtatcaaggggaaawaaaagaaaaaaatttaatttctctttcarataacactatgcctttcttagttttagatactaaaactgacaagaatataccccttctgacagcctgttttatgggtgccataataactttctctacttttataacaaggctagttatgtttgttacgtaagatttactaacctgcctcctgttttgaaaaacctgattgcttatagcaatcgatatattaatcgatatattaatttttcttgtttttcagccataaggatggatatgacaaatatactacatggaaaaaaatatggactagcaatggcaaaaccgaacctagtcccaaagctttcatggcagaccagcaactcccctactgggtaaggagagtgatgctctctgtctgtgaagtatttgtggagccaaatgcaagaggcatggatgaaaatgctgtttaggaaatctcctattacatttattgttccttctatgactattaaagcaaatattttttatttttatagaaagctgagatatttcaacatagtataaaagaggaaactaggctgggtktggtggctcatacttgtaatcctagccctttggtaggctgaggtgggaagactgctttgcgcccagcctgggcaaagtgagaccctatctcatagtaagaccccatctttacaaaaaaaaattttttttttaagtaggcaagaatggtggcaggtgtctgtagtcccatctactcatcaggttgaggttggggaattgcttgagctcaggagttcaaggctgtagtgagctatgattacaccactacactccagcctggatgacagagtgagaggctgtctcaaaaaaaaaaaaatggttttaaaaaagaaaaaactaaaggctcaccaccagctggtgatagtcattgctgagcttggtacatagctttttgatcctttttttcttttcatatttttgtctgtttaaacacaatttcatgctttatatacatatactgattaggtttaaaatcaggcttcagatacgatttttgtaatgtttagctttttaaaaattaatttgggccagggctgtggctcacacctgtcatcctagcactttgggaggctgaggtgggcagatcacaaggtctagaaatcaagaccatcctggccaacatggggaaaccccgtctctactaaaaaaatacaaaaattagccgggcgtggtggcgcgcgcctgttgtcccagctacttgggaggctgaggcaggagaatcgcttgaacccaggaagcggaggttgcaatgagctgagatcgtgccactgcactccagcctggtgacagagtgggactctgtctcaaaaaaagaaaaaaaaaattaaattgacctcatattcttttttcatttagtcattctttgaaaatatattttcattattgcatatattgttgaaatataccaccatttaataaatgatttgctattttttttttctgagacagggtctcactctgttgcccaggctgtagtgcagtggcacaatcttagctcactacaacctccacctcccgggctcaagcgattctcccacctcagcctccctaatagctgggactctccgcacatgctaccacgcccagctgacttttgtattttttgtagagatggggtttcaccatgttgcccaggctggtcttaaattcctaggctcaagtgatccacctgcctcagcctcccacagtgctgggattacagacatgagccacaatgcccaatttttttttaagatggggccttgctctgtcgttcaggctagagtgcagttgtgggattatgactcactgcagcctcrgtctcccaggctcaagtgatcctcccacctcagccggcagagcagctggractatagagtgcaccaccatgtccagctaatttgttaattctttatagagacaggactcgatatcttgcccaggctggtctcaaatactggactcaagcaatcctcccacttcagcctctcaaagtgttaggattacaggtgtgagccactgtacctggccaatttgctaattttaaaaatattataagtaatgctgagctttgtgcacgcttaaagattttttcattgaagtaaaattcgtataacataaaattaaccattttaaattgtgcagttcagtggcacttagtatattcacaatgttatgcaattaccacccctatctaattccaaagtattttcatcacgcacaagggaagccctaattcttgctacccccagttcctggtaaccgctaatctgctttctgtgtttatggatttatctattttggatgtttcatatgaatggaatcgtgcaacatgtaaacttttgtatctgacctttttcacctaatgtaatgtttttgagattcatatccattgtaggatgtgtcagtacttcattcttttttatgggtgaataatactccattgaatggatatgccacagtttttttaagcattcatctattgatggacatctagatcatttcaagcgtttagcaattgtgaatagtgctgcagtgaacattcttgtagaagtatttgtttgactacctgcttgcaattcttgggtatgtacctagaaatataattgctagatcatatttggtaattatatgggacctcaaactcttttccatagttcctgtaccatttttcattcctgtctgtagcatatgagggttctgatttttccacgggtttgaagtggtatctcatggtggttttaatttgcatttccctaatgactaatgcaacctttcgtatgcttgttgtccatttgtatatctttggagaaatatctgttaacatcctttgcccatttttgttttgttttgtcgtctttgagatggagtcttgctctgtcacccaggctggagtgcagtggtgcgatcttggctcgctgcaacctctgccttctgggttcaagccattctcctgcctctgccacctgagcagctgggattataggtgtgtgccaccaccctgggctaatttttgtatttttagtagagacggagtttcatcatgttggccaggctggtctcgaactcctgatgtcaggtgatctgctcgcctcggcgtcccaaagtgctgggattacagatgtgagccacctcgcccagtcttcctttgccttttttaaagttgtctttttgtagttgagttgtaagaattatatatatataaattttttttttttttttgagatggagtttcgctcttgtcacccaggctgcagtgcaatggtgccatctctggctcactgcaacctttgccttctgggttcaggtgattcttctgcctcagcctcccaagtagctgggattacaggcacccgccaccacacctggctaattttagtagagatggggtttcaccatgttggccaggcaggtctcaaactgctgacctcaggtcatctgcctgcctcagcttcccaaagttctgggattataggcgtgagccaccgtgcctggcctttttatatattttggatactaaacccttattagatctatgatttgcaagtattttttcctataggttgttgtcttcctttggtagagcccattgatgcccaaaggtttttaattttgaggaagttcaatttatctgtttttttcttttgttgcttttggtgttaccgcttataattcgttgccaaattcaaggtcataaaggtttactttcttttctaagagttctgttgtttgagtgcttacgtttaggtattattttatctattttgaattaatatttgtatatgtgtaaagtagggtgtctaacttcattcttttgcatatggatatctgcatgcttttaaaaaataaactttattttggaatcatctttttaaaattatttatttatttatttttttgagacagagtcttgctctgttgcccaggctggggtgcattggtacgatctcagctcactgcaacctccacctcccaggttcaagcgattctcctgcctcagcctcctgagtagctgcgattacaggcatgcacccccacgcccagctaatttttttatatttttagtagagatggggtttcaccatgttggccaggctggtcttgagctcctgacctcaggtgattcacctgcctcagcctcccaaagtgcaggcgtgagacactgcaccaagtctggaatcattttaaatttactgagttgctaagatagtacggagagtttccatatatccttcatgcagcttcccttaatgttgtcatcttacgtaccatgattatttgtcaaagtaagaaattaactttggcatagtactaataactgtagactttatttggatttcatcagtttcttcactaatgttcttttactgttctaggatccaacgcagcataccacattgcatttagtatgcatgctttttgactaactgaaagtaaatttcagtttattttacgctgattttttttttttagacagggtctcagtctgtttcccgggctggagtgcagtggtataatctcagctcactgcagccttgacctccccaggctcaagccatcctctcacctcagcctcctgagtagctgggactacaggcatgcaccaccgcacctgtctgcttttgtattttttgtagagacaggatgtcactatgttgcccaggctagtctggaactcctgggctcaagcagtctgcctgcctcagcctcctaaagtgctgagattacaggtgtgagccaccatgcctggccctgattgtttctttaggttagagctggaaaacctttctcttttttttttccttttttttgagacggagtcttgctccgttgcccaggctggagtgtagtggtgcgatctcggctcactgcaagcttcgcctcccgggttcatgccattctcctgcctcagcctcctgagtagctgggactacaggcgcccgccaccacgcctggctaactttttgtatttttagtagagacggggtttcaccgtgttagccaggatggtctggatttcctgacctcgtgatccgcccgccttggcctcccaaagtgctgggattacaggcgtgagccactgcacctggcctagaaaacctttctgacaacaaaactcagatccccttggcactttcctcaccctgaggaagtattaaatcagaaattatcctaatggggtgaaagtgaattatatggatgatggtaatgcaaggagragaaaaaatacttaggattgctaacaggttggagaagatgaccaagtggtggaggatagaaatggtaactgaagattagctcacttgttcatcttgacttgatacttcccatctaggttcagtgtacaaaacctgagtgtagaaaatggaggcagcttaccaaggaaatccagcttactccacagatagccaagacttatcgatgcggtatgaaaccaaatactgctattaaggtatgttctctttttgcttttgagttaattgatatattaatgtagtcagtaaatagtaatggtgtatatgtttttcatgtattgtgttgatcattctgtcaaggttgtatttgcatgcatgtaatagaaccccaactataatggcttaaccaattaaggattttacttttccgtcattataagcagttaagacataggtaagcagttaagacataggctgtccagggttggttttgttgcccaaggaaatctctttgtagcttccactccagccacctgtagtctaacttcatcctgaaggccacaaggtagttgctataccaccagtcatgtgtccaaatcctaagcagaaaagggggaaaggtcaaagggcaagaggggagtatcagctgagcctgtccctcttttcctgggggaaacaggagctttcctggaagttccttcagtagatttctatttatatctcattggcgagaacaggatcatgcagctactctggttttaatttttttgctagttttggtttgtttcgtttttatataatgatgttgacaccataaatgcagcttccctaactatagtgaggacagaggaagaaaatattttacgactgaggatgttgcaacactaaacaaagccggatcctattagtgaggaagaaaagattaattgatatgcttggcaattaggaatcggccatcgttgttataatgtgccttttttgaaatttggcaattacttactgtttaaaaacctattattattgctttagtgcgttaagggtgttagtctacacaaatgccactggtacctgcagtacattaaagaatattaggaatccttttaatctcagaggtaaaatactttgtttctagaaattgagataaaattcacatattataaaattcacccttttaaagcatacaattgagtggctgtggtgcaggttgagcaccctagtctgaaaatctgaaatgttccaaaatctgaaactttttgagctctgagatgatgctcagaggttctgctcaaaggaaatgttcactggagcattttagattttcagattagggatgcccaaccagtaagtatgttgcaaacattccaaaatccaaaacacttctggtcccaagcatttcaaataagagaaattcaacctgggattcaaaatataaacatcatatttttataacgcctggaattcagtaaaagcctgggattcaaaatataaacataatattctatttcattatatttataataaactatatagtttattttctgtgcctggcctattcgtttcttatgaataaaaacatattaggagtggttgggcgcggtggctcacacctgtaatcccagcactttgggaggccgagatgggcggatcacccgaggtcaggagttcaagaccagcctggccaacatgttgaaaccctgtctctagtaaaaatataaaaattagcccagtgtggtggcatgtgcttgtaatctcagctactcgggaggctaaggtaggagaatcacttgaacccgggaggtggaggttgcagtgagctgagatcatgccattgcactccagcctgggcaacaagagtgaaactccatctcaaaaaaaaaaaaaaaagtgtaatcagtgagttatatcataaatttatgtttaatgtttgcaaaactaccaaatgtctttccatggttgtaccatactacaacattttgtagtgttattcttttttaaaaaatttaattatagccattctaatgggtatgtactagtatcattgtagggttagtttgcatttccctactaactggtgatcttgagtatattttcatatgcttattggccatgcatttctctttggaaaatgtctgatcaagttttttttaaattgggttttattgatttgtagttctttatgtaatctggatataaccatgtattttgaatattttttccccccagtttgtgttaagccttttcattttctgaataggtcttttatgaggaattttccattttgaagtgtagtttattcactttttcatttatgcttagaactttttgtgtcttttctgagaaatcattggttacctttcaccttgtaaacatactctgtgatttctttgaggtgccttatagttttcatctttacttttagatcactagctcaagtttttttttgtttttgatgtgagaggtaggccaacattcaattttttccatacagatatttagttgttcattaccgtttgctaaaaagactgtatttttcactttgtattatcttagcaccattgctttattttattttattttattttagatggagtcttgctctgttgcccaggctggagtgcagtggctcgatctcggctcactgcaacctccgcctcccgggttcaagcgattctcctgcctcagcctcccaagtagctgggactacaggcacacaccaccacacctggctaatttttgtattattagtaaagagagggtttcaccatgttggccaggctggtctcggactcctgacctcgtgatccacctgccttggcctcccaaagtgttgggattacaggcgtgagccactgcgcccggccctatcttagcaccattataaaaaaatcaattggccgtatgtgtgtaagtctgtttctggaccctgttgcattaatctgttttttacccaatgctctgctgtcatgattattgtatctgtatagtaagtcttaaaatcaggtagtatacattcttctaactttttttttgttttcaagattgttttggctattctaggacccttatatttccatgtaaatatcaacttcttagtatccaataaaaagcctctgggttttttattggaatgcattgaatctatgggtcatttggagaagtgacatctttacatttttcagtcctctaaggggttggtaaatgatggctcatgggccaaatctggctgatacgtatttatttttatttatttttatttttctgtaggttattggggtacaggtggtgtttggttatataagttctttagcggtgatttgtgaaatttggtgcacccatcacccgagcagtatacactgcaccctgtttgtagccgtttgtccctagccccccttctacttttccccccaagtccccaaagttcattgtgtcattcatatgcctttgtgtcctcatagcttagcttccacatatcagtgagaacatatggtgtttggttttccattcctgagttacttcacttagaataatagtctcctatctcatccaggttgctgcaaatgccgttaattcattccttttcatggctgagtagtagtccatcatatatatatgtgtatgtatgtatgtacacatacgcacacactgcagtttctttatccacttgttgattggtgggcatttgggtgggttccacaattttgcaattgtgaactgtgctgctataaacatgcatatggaagtatgttttttgtataatgacttcttttcctctggatacccagtagtggaattgctggatcawatggtagttctgcatttagttctttaaggaatctccacactgttttccatagtggctgtactagtttacattcccaccagcagtatagaaatgttccctgttcactgcatccgcaccaacatctactgtggtttgatatttttattatggccattcttgcaggagtaaggtggtatcacattgtggtttcgacttgcgtttccccaatygttagtgatgttgagcattttttcatatgtttgttggccatttatatatctactttgagaattgtctattcatatccttagcccactttttgatggggttgtttttctcttaatgatttgtttgagttcattgtagattctggatagtagtcctttgtcagatgtataggttgtgaagattttctcccactctctgggttgtctgtttactctgctgattgttccttttgccttgcaaaagctctttaaagtcccagttatttatctttgtttttattgtatttggatttgggttcttggtcatgaaatccttgcctaagcaagtgtctagaaaggtttttctagtatttcttctagaatttttgtagtttcaggtcctagatttgtccttaatccatcttgagttgatttttgtgtgagatatgaggatccagttttcctcccctaaatgtggctagccaattatcccagcaccatttgttgtaaagagtgtcctttccccactttatgtttttgtttgctttgttgaagatcagttggctctaagtatttgggtttatttctgggttctctattctgtttcattggtctatgtgcctatttttataccagtaccatgctgttttggtgactatggccttatagtatagtttgaaatcaggtagtgtgatgcctccagatttattcttttgctttgtcttgctttggctatgcgggctcttttttggttccatatgagttttagaattttttctaattatgtgatgaatgatagtagtattttgatggggattgcttttaacttgtagattgcttttggcaatatggtcattttcacaacattgattctacccatccgtgagcatccatttgtttgtgttgtctatgatttcttccagcagtgttttgtagttttccttgtagaggtctttagactccttggttaggtttattcctaagtattttattttattttgcagctattggtaaaggggttgagttcttgatttgactctctgcttggtcgctgttggtgtatagaagagctactgatctgtgtacattaatcttgtatctggaaactttgctaacttcttttatcagttctaggagccttctggaagagtccttaggattttcggggtaaacgatcatatcatcagcaaacagtgacagtttgacttcctctttaccgatttggatgccctttatctctttctcttgtctgattgctctggctaggacttctagtactatgttgaagaggagtggtgagattgggcatccttgttttgttccaggtctcagagggaatgctttcaactcttccccattcagtattatgttgtctgtgggtttgtcatagatggcttttattacattgaggtatgtcccttgtatgccgattttgctgagagttttaatcataaagsgttgctggattttgtccagtgctttttctgcrtctattgagatgatcatgtgatttttgtttttaattctgtttatgtggtatatcacatttattgatttgcatatgttaaaccatccctacatccctggtatgaaacccacttgatcatggtggattatctttttgatatgttgttggattcrgttagctagtattttgttaagcatmtacattagctagtattttgttagcgtctatgttcatcaggaatattggtctgtagttttcgtttttggttatgtcctttcctggttttggtattagggtgatgctggcttcataaaatgaattagggagggttcctctttatcttgtggaatagtgtcaaaaggattggtaccaattcttcaaatgtctggtagaattctgctgtgaatccatctggtcctggactttttttgttggtaatcttttaattaccatttcaatctcactacttgttattggcctgttcagggtatctaatccttcctgatttaagctaggagggttgtatttttccaggaatttgtccatgtcttctaggttttctagattatgtgcgtaaaagtgttagtagtagcctcgaatgatcttttgtatttcagtggtgtcagttgtaatatctttttttttcttaatgaagttatttggattttctccttttcttggttaatcttgctaattgtctatcaactttatttatcttttcaaagaaccagctttttgtttcatttaacttttgtatttttttttgtttcaatttcatttagttcttgtctgatctcggttatttcctttcttctgctgggcttgggtttggtttgttcctgtttctctagttccttgaggccacacctatttatttatttatttatttatttttaattttaaaaattttctgtagtgacagggtcttgctctattgcccaggctggtcttgaactcttggcctcaagtgatcctcccttcccagcctcccaaagtgctgggattacaggcgttagccaccgcacctggcaccacacctgttttgtaaatatggttttaattgggacatagccatgctcattcctgctcctggtaccacacctgttttgtaaataaagttttaattgggacatagccatgctcattgttatgtattggctgcttttatgctacaatgacagtatttgcgacagagcccagaatatttactatgtggttccttacagaaaatgtttcctgaccccttttctgacccatgggcatggtatctgtctccatctttttgaggttaatgtctcccaacagtgttttctaatattcactgaggatatcttttgtgcctttgttcaatttatttctagatacttaattttttttcctgtaattgtagataaaattgattgattgattgatttttttgttttggacggagtctcactctgtcatccaggctggagtgcagtggcaccatattggctcactgcaaccaccatctcctgggttcaagcaattctcctgcctcagcctcctgagtagctgggattacaggcacccaccaccacgcccagctaattttttttacatttttagtagagatggggtttcaccacattggccaggctggtctcgaactcctgaactcaggtgatctgcctgccttggccttccaaagtgctgggattacaggcatgagccaccgcacccrgcctattttttattatttatttattttttgaaacagagtcttgctttgtcgccaggctgaagtgcaatggcacgatctcggctcactgcaacctccgcctcccaggttcaagcaattcttctgcctcagcctcccgagtagcagggactacaggcacacatcaccatgcctggctaattttttgtattttagtagagacagggcttccccatgttggccaggctggtctcgaactcctgacctcgtgatctacctgccttggcctcccaaagtgctgggattataggtgtgagccactgcacccagccaataaaatttatttttaactccattttcaagttgtgcactgttgcaactatatagaaacacaattgacttgtatattggccttgtacccagagactttgttaacttcacttactaagtttcatagatctttttcatagattcctttgggttgtctgcaaatcagtcatacaaataatcatgattgtctacaaacctcttctcagtctttttgccctttttcttgccttactacattggtcaggaccaccagtgatagtgttctatagaagtgatgagagcagacaaccttgccttgttcctgacttcaggaggaatgtgttcagtatcgtcatatacagtgttggctatagctctttgtagacattctttatgagatggagcagtctccttttcttttcctaatttgctgataactttttatgatgaatagatattggctaatagttttcctgcatcttttatgatgaccattgcattttcttctttaatcagcaaatgtaatgaattataccaatttgggaatgttgaatcaatgttgcattcctggggaaaaaaaatccatttgtttttaatatattgttctttttatatattcccagatttgattaaattttgttaaagatttttgcatctgtgtttgtcttggatactttgttactttcctttcttgtaataaccttgtcgggttctgctttcagagttatgctggctctgtgaaacgagcagtatatcctcttttctattttgttgtataggtttgatattacttctttttttgtgtttggttgaattcactaatgaaacaatttgggccagtagttttctttgtaaaaagttaggaattacaaattcagtttctttaacagatatatggccatctaggtggtttatgacttctttccattttggaaggttgtgtttttcaagcagtttgtctttttcatctatgttgtcacatttttaacttaaagttgtttgtactgttcccttgttctccttttaacgttggtgggctttgtctcggtatcctttcttttattcttgatgttggtgatttgagagtgagggaggggaagcattgacctgagcctgggattagattcctgaaattggtaagagctattccaaaatctttcaatttagcactagatttttttccttttttttttttttttttttttttttcataaggcagggtctcactctgtctcccaggccagagtacagtggcataatcctggtttactgcagcctttacttcctgggctcaggtgattctgccaccgtagtctcctgagtagctgggactacaggtgtgtgccactgtgcttcactaatttttgtatttttttttttttttaatagagacggggttttgctgtcttgcccagggtgaggcccttgattgattctggaactcaactttaagagttgaaggcctctctgagaagaggaagagaaaagagaaaatgggaaggagctgacatgagggcgtgggcagttcatttccaggctgcgtggctgcactgatgggagctgggaactgagcaatgaaaataccatgaacaggcagaggggagcgtgtccagcttgcaggaacaatatcttggttgcactaaacttaactacctgtgtcccagattacttgacaatgaaaagttgactcagtggcatttcattataatatttaaaggagagttcagccaagcaacaataaaaaatagcagactattttaatagattctactttttgagccattttcactcagcctgggtatgcgatgattctaaaagttttttcagacaattttttaagattttggatgatttgtgtaatactacattaatcaatactagctgtgattttgttgttgtggttttgttttgtttgagaaggagtcttgttctattgcccaggctggagtgcggtgacaccatctaggcctactccagcctctgcctcccaggttcaagcgattctcccacgtcagcctcccaagtagctggaactgcaggtgctcaccaccacgcccagctaatttgtgtatttttagtagagacggagtttcaccatgttggccaggctggtctcgaactcctgatctcaggtgatccacctgtcttggcctctcaaagtgctgggattacaggcgtgagccactgctcccggccactctagctgtgatttttacattttgttctgtgctttgactaaactgtaattggagtgatccgtaatctcacctctcttttacttgctgacaattgagtggacaactttgactttactaattgtttaaattatgccttgctttttgttttttaaattttttcttgggtggtggttgtcacttttaatttctctaagtagtttttgaaaactcgaaggttttctgtagaacacttttagacaaatgatayatgttcattattgaaaaattccagcaatrtagaaaagaacaaagatagcagaaaaaaattcatgcagtcttcattgtgaattaaccatcattgagtgagattcattcaagagtatctatatagtgtacctctgtgtgtatacagggagaaggcctgattgacagatagcttcctgttaaggaatagtactacacacactttttttttctaagttggttgtgtttaatataacatcaatttaaaataagaaaaggaagccaaagtgaaataagaaattgttgaacataaaatatttctttatcccaagaaataagtttctaaaaactctctaaaaggttaagaaaatatgagaataagaagtgggaatcagttgggcgcagtggctcatgcctgtaatttcagccctttgggaggctgaagcaggagtttgagaccagcctgggcaacatgacgagaccctgtctctacaaagaatacaaaaattacctgggcctggtgacgcgctcctgtagtcccggctacttgggagactgaagtgggaggatctcttgagcccatgaggtcaaggctgcagtgagccaagatggcaccactgcactccagcctaagtgacacagtgagaccctgtttcaagaagaaaagtaaaaaagttgaaatcactctaacttgaaaaaataaaaaaaacaaacttcatgtttcaattttagttgatattggtcaacaccctgctatgaaatcagaaaaaataaattatataacacttccttttcttctctcccagtttttgttatggttttgttttttgtttagttttcttggcgattttgttaattattttctataactgtattccctccattgtttactctgacttatatgtttatgtagatttactgctctctgtaatttcttttaccatagttccatttttttattttgatttgaaacctggctggctgtattttaacatcaagcatttttttccaggagggcctcagaggtgtcagattccttacatttttgaaaacttaactacttttcttctcacctcaccttagttaaagcctttatagtctttttaaattccaatttctatggataatatcaaatctcttcccccaaccccagtcaccctcctttgagaccccttcatcttattgttccagtatgaatcgattactctccacaacctgaacttttgaaatattaatttaaattatatatattgaccctgagtaattttggttttcagcgtggtatgctgttaaggagaaagtcagtgaaggtttatttgtagaataacatgaaaaagaacaattgacaactctgtacactgtttttgattttgctgtttctcatttaatatgtcttaaaagatgtgtccatgtaagtatataaagagctcttctttctcttcatttttatttcattcttttttttttgagacggagtcttgctctgtcacccaggctggagtacagtggcatcctcttagcccagtgcagcctcaaactcctgagtkcaagtgattctcacctgactcagcctctcaccacaggcacrcgaccatgcacagctacttttttttaatttttttgtagtgacagggtcttgctatgttgcccaggctggtctcaaactcctggcctcaagtgatcctcccaccttggtctcccaaagtgctgggatcacaggtgtgagccactgtgcttagcccttcattctcttcaatggctgtctaataagtagtccactgaacagacgtcctgcgtttaatttagtgctattgaagggcatttaggttacttttaaacgtttactgttcctgactgtgctttagtgaaaagctttctatctgtgctatttttgagtatatttgtaagatcagttcctacaaatgaaatttctgtatcaaagggtagatgctattgttttaatgtgaaataagttatagacacaaagagttataatttatatgtaaggaggaaagaatgaaagcaaacactggtgtgcctccctactactcagttgaagaaacagagcactcccagtggctttgtccctccctccagtgtgctcctcagtagttattatgcttcctctccttcccttgcaggggtaaacaatgtcctgaattttgtgggttttttttttttttttttttttttttgagacagagttttgctcttattacccaggctggagtgcaatggcgcagtctcggctcattgcaacctccacctcccaggttcaaacgattctcctgcctcagcctcctgagtagctggtgcccgccaccacacctgactaattttttgtatttttagtagagacggggtttcatcacgttggccaggcttgtctcgaactcctgaactcaggtgatccacccacctcggcctcccaaaatgcagggattacagatgtgagccaccacaccgggccctgaattttgtctttcttactcctttgctttttgttacagggttaatacgtatttctgaaaccctaagtaacataagttttgcatatttttatactggttacaaattatatcacaattgtttatattcctctttaacttgctcttttcgctcaacattaaggttttggagatgcatccatgttgatgcatctaagactttggtgtgttaataccaaagagtagtattagaattacattgtgtgaacctaccttggtgtgtgtattctcgtgttcatgaatataagggctgtttctagtttttggctgttacatacaaatgctactgtgagcattcttgcctggcacaaggacaagaatgtctttgaaatacagtccaaggactagaactgctaggccatatggtctaacaatcttgtttatttaggcaacttttcttagtgaaatatacaaacagaagacgcacaaatcaaaatgcataactcaatgaattttcgccaagtactcatttagctggctcccaggaaagtaacagaacacacaccagccccttagaagccccgtgtcacttttaatcacagtctttaacccttgctcccctagagtaactacctacttttctgacttacaatcatatagttttgttttgttttgtttttttgcttgcttttaagttttacatgaatggtatcctacactatgattgttctagcttctttttttttttttttttttgagacggagtgtcgctttgtcacccaggctggagttcagtgttgcgatcttggctcactccaacttccgccttccaggttcaagtgattctcctgcctgagcctcccaagtacctgggattacaggtgcgcaccaccatgcccggctaatttttgtatttttagtagagacgaggtttcaccatgttggccaggctggtctcgaactcctgaccttaggtgatccacccacctcagcctcccaaagtgctgggattacaggtgtgagccactgcacggggcctgttctaacttcttttgcccaacattgtgagatgtgtccatgttgtaatgtgtagtcatagtttgttctcattgctgtgcagcatgccattgtttgactataatacaatttaagtgtccattgtactgttgatgacctttgggttgtttctagcttttttcctttttttttttttttttttttttttagacaaggtctcttgtccaggtggagtgcagtggtgctgtcacagctcactgcagcctcaacctcctgggctcaatcagtcctcccacttcagcctcccgagtagttggaagtacaggcatgcaccaccaagcctggctgatttttgcaatttttgtagagatggggggtgttacccaggttggtgttgaactcctaggctcaagcgatccacctgccttgacctcccaaaatgctgggattataggcatgagccactgagcctggccagtttctagctttttttgaatacaaataatgctcctttgaacattttgtaatacttttgttggtgcagatatacaagagtctctctctggaaaatataacccagttagaattgctggatgtgtcatacgtattttcagttctaaaagatgatgtcaaatgattgtgcattttaaatgttcgtattttgtcaccgcccttcgtggttgttatatgcctttattttccaccaggaacatccttatgatctcatgtgcctgtctccccacactctcactttttttttttttttgagatggagtctcgctctgttacccaggctggagcgcagtagcgcagtctcggctcactgcaacctccactttccgggtcccagtgattctcctgcctcagcctctccagtagctgagattacaggcacctgccactatgcctggctaatttttatatttttagtagagacagtttttcactattttggccaggctggtctcaaactcctgaccttaggtgatccacccaccttgacctcccaaactgctgctcaacctcccgaagtgctgggattataggcgtgagccacagagccaggcctccagrcactctgatttatacattgtttcataaaaatgcttttctttgccagcctgataggtgaaaagagatatcttattgaagataaatggatacctgagactatattttataagcaaccctaatttaacacttggttttcttttgtagcctgagacctcagatcattgttccctcccagaggatctagtgagtatttccggatggtgtggattggggttaattgtgcctttgatgataagtgttacaaggaaatgatagtaacagcttcatgaatttctttctctttggttgctgatcagtgactttttaatctaacatggtaactatattatgaaaatgttagcaatagtgatattatgggtagtcctgtccccaacttaaaaaataaaaataaagttatgttgcttttcattaaaaggaaacaaagaggaagacacagctctcctgccttgctctagggctcaggcttgctgtacttgtttttcaaggatgactttgtgaccttttctccacttgagtcctcctaagaaaagcacaagagggccacaatttgatcgtcttggcctggattcagctgcaggagtgttcttatgcattctgacctcagcatgttggctttgtcctgtcctcatgcagatatggcagggggagcagtacttccagctggcaaagctggtcacatttcctctgtyttcataagactttgctacctgagttgacaaacttcagtgtaccatgtaaccagattcggtgactgtttcagaaaagaggtttttaaattttgggtttyttgagtttctagaatcctgagtcattctgattttcagtgattcaggattggrttgttctagatgtctgaaactcaggaactacgatagcttttcaggcaaagacagcattgacttttagcaaatctactttaaatccattctgttatataaaagggtgtttgcatgtgtattagtccgttctcacgctgcttgctataaagaactgcctgagactaggtaatttatgaaggaaagagggttaactgactcacagttctgcatggctggggaggcctcaggaaacttagaatcatggcagaagaggaagcaaatgtgtccttcatgatggctggaaggagaagtgtcaagcaaagggggaaaagccccttgtaaaaccatcagatctcatgagaactcattatcacaagaacagcatgagggtaactgcccctgtggtttaattacctcctaccagctccctgccatgacacatggggattatrggaactacaattcaagatgagatttgagtggggacccagccaaaccatatcagtatgtatatatgtgtgtgtgtgtacacacacacacacacacacacacacattttttttccaggctccagaatagacatttttttttyccccgaattcctggagcataagtgtcagattgcatttagaaaagcctgtctaccatggattgtggcagtgttgctttggaagccacatagactttctttttatttcagtagtcatcatgagaaggctctgatttgatgactccatgttaagtcaactctggaacagtatcacgtatttgaagactgaaaataactgcttttgttcagwtctacatttggcgtcttattttgatgtttgcagtgtacttttccctctgaaagttttttagyagcctttggcaaaaagcggtaatacttactacttgggagcattatkttttatgcccagtttcccaattttaactatcttgaggtcctaagttaaaggcggggggcttgaatgatagatgattactgagcagagatgcatttttcacatcagasttaaacctaggcttgcratctagtaaatgggcacagctttcagactcacctggcattggggagcttattttgggggagggataagggaggctgttgccatatgtcagaaagaattctgtctgggagacattcttgccaggtgttatcagcccatttttgtttctacatctgtgtgtgtagagctctggaatagaattgttaartctgagcaagaaaaagcatagygggttaaggamaagtgaaacgaagagaaccctctgtccctggcagaatctgcatgtacatttcttgtctgtccttgtctctcttcttcctgtctggcccattgcagagagtattggaagtttccaaccattggtggtactctatgctcatcctacctcctttgctgaaagacagygtggcagcgcccctgctgtctgcctactaccctgactgtgttggcatgagcccctcctgcaccagcacaaaccgcgccgctgccactggcaatgccagccctgggaagctggagcactccaaggctgccctctccgtgcacggtgagagccattcctgggactccctgctttctattccccgctcccctccctgaggaacgtgtgagtgagcaaaacgcaaaggattttttttaaatgtgcaggctgggcacagtggctcatgcctgtaatcccagcactttgggtggccgaggcaggagggtcccttgaggccaggagtttgagaccggtctgggcaacatagcgagatctcgtctctaaaaataaataaatagataaaaattatttttaaaaatgtatgcgacctatgatataaagcccctcattatttcatggaaatggttgtactgtggatcagtcacatcatttgtgtatagtgtgtggttaatttttcctcagtagtttggaaaacctgcaacactcatgaattacctacaggacttaatgagtatttatttggaagttggattgctgtcttgtttaatgataacatgaactctgacttactgggaaaaggttttcaactatatgagcagtcctttttcttctgagtctttctgcctctaattattgccactggtgatcccagcgaaatcacctactctcaaaaaaactgcagagcaggcatacttttgattatttactttattttttattttattttattttttgagatggagtctcactctgttgcccagactgtagtgcagtgacactatctcagctcactgcatcctcyagctcctgggttcaagcaattctcctgcctcagtctcctgagtagctgggactccaagcacgtgccactacagctggttaattttttttttttttttctttttgagacagaatctcagtctgtcacccaggctggagtgcrgtggcgtgatcttggctccctgcaacctcctcctcccaggttcaagcgattctcctgcctcagtctcccgagtagctgggattacaagcgcaygctaccacacctggctaatttttatatttttagtagagayggggtttcatcatgttgcccaggctggtctcgaactyctgacctcaagtgatccgcccccttcagcctcccaaagtgctgggattacagacatgagccagtgcacccggcctgattatttactttaaaggcatctttaaaaatctacattagaattcttggtgtaagaagcaagaattctggatttcctacgcctggacaggaacaaatggcatttttgattatgcaaatagatttttgcactgtggtcctatcttaaggttttgttgttgttgttgtttaccaataacactggaatatagatgtggtggaaatcaaagctaaagtggtaattcccagggttaatgaagatgcgatgaagaggcatttgactgctgttagggagagtgtatgtttacraaggaagatttggcagtgtgcatcaaaaacttttaaacagacactctttgacccagcagtgctatttctaggaatttatcttaaacagctaatcaaatgtaaatccaaagataggtacaaagaaatttcttttcacattgcttgtaatagtgaagtaattggatgaaatgtaatgcctagcaatagggaaatggttaagtaataagaaaatatacagccattgaatgcatatttagtgacacaggaaagtattcatggtattgtacacattaaaaagcaggttagaaaacggcactttcataacatttttttcagtttcatgaaggcaaatatctattatgtgaatattctctgttaatagacacagaaataaggataaagtgtacctctaaatgtaactccactactgacataatcaggggttagtgattgttatttacttctatgaacctattcattttatagtcagaaaaatgccataagagttattttaggccgggcacagtggctcayacctgtaatcccagcactttgggaggccgagacgggcagatcatgaggtcaagagtttgagatcagcctggccaaaatggtgaaactccrtctctactaaaaaaaaatacacaaaaaattagccaggtgtgtggtatgtgcctgtaatccctgctactggggagggtgaggaaggagaatcacttgaacctgggaggcggaggttgcagtgagctgagattgtgccattacactccagcctgggtgacagaacaagactctgtctcgagaaaaaaagttattttaaaaacgtacctccatgaggagtgggcattcagtggatatagaatttgtcttacaagatgagaaagttctagagatctgtgcacagcagcatgaatgtacttaacactactgaactgtacacttaaaaacagataagaaggccgggcgcagtggctcacgcctgtaatccctgcactttgggaggctgaggcaggtggatcacgaggtcaggagatcaagaccatcctggctaacacagtaaaaccccgtctctactaaaaatacaaaaaaaaaaaaaaaattagctgggcatggtggcgggcgcctgtagtcccagctactcgggaggctgaggcaggagaatggtgtgaacccgggaggcggagcttgcagcgagccgagatcgcgccactgaactccagccagggcgacagagtgagactccatcttaaaaagaaaaaaaagatagctgggcatggtagctcatgcctgtaatcccagcactttgggaggctgaggttggcagatcacttgaggccagtaccttgaaaccagcttggccaacatagtgaaacccatagctactaaaaatagaaaaattagccagatgtggtggcgagcacctgtaatcccagctactcaagaagctgaggcatgagaatcacttggacccaggagatggaggtcrcagtaagccgagattggaccactgcactccagcctgggcaacagagcaagactctgtctcaaaaaaaaaaaaaattaagatgataaattttatggtatgcatttttttaccacagttaaaaataaaataatttttccatgctatggaaattaaagttgagaatagcatgaagaaagaatgagaaaaatacttaatttatgtacgttttgtctaactgggtggaggaagcaaaggtatttatgtagggtagagagtggagcttgtctaggcttactttttggtttgcttttgccctttaattcttctggatttggaagttacagcttgtaggagttgcccatttgtgttacctatcagttccaggcatgaaccgatacttccagcctttstaccagcccaatgagtgtggcaaagccctctgtgtgaggccggatgtgatggaactggatgagctctatgagtttccagagtattcccgagaccccaccatgtacctggctttgagaaacctcatcctcgcactgtggtatactaactgcaaagtaagtaagggcatgttagccaatagcactggacagaggaggaccatgttgaaaaggaggggatacttcatctggggatggaaccttttatgccagggtttctcagccgtgcctctgttgacaatttgggcagataattctttgtggtggggactgtctttgcactgtaggatatttagcaagatccctggcttctacccactagattccagtaatgcttcccacctgtgaaaaccaaatacgtctatagacatttccaaatggggacagaatcaccccttgttgaaaaccaccactttagaccacacatagtcagaatgctgactctccagtggtgagtataaggtgcaaggtttggtccaaagagttccaatggcaatggcaggagggaaaaacatcaaagattgaattacatacaaatccttgaggacaggaatttttattcacctcggcatcctaaatcaaccaagaccagtacatttcttctgttgggtctaaatacatgttagggctgtcacactgtacccaccttgaaaaaggtgaaaataaattatggggcagaatgggaatactagctaaaaacaaaaaacaaaggggctgggtgaagtggcttgtgtctgtaattccagcactttgggaggctgaggcaggaggatcgcttgagcctaggagttcaagaccagcctgggcaacataatgagacccccccatctctacaaaaaattaaaaaattagccatgtgtggtggcacatgcccatagtcctagctacttaggaggctgagacaggaggatggcctgagcttgggaggtcaaggctgcagtaagccgtgattgtgccactgcactctagcttgggtgacagaatgagaccctgtttccaaaaaaacccacagagattctcttgaccctagcatttttctgatttattaatttaatcagcagtttgcgtcattgctgaattcagaacattgtgsaagactgccaaagtgatcttgactaaagaaagatatgccagtttcaccttggcatttcactggattagaatccagaatgaaatgacataacctgattaagttatggctgttaatgcaactatatgaattatagccaggtgagtaggctgtgcgaggtagccagctgagtaggctgtgcaacttattttccgcccagtagccttgagataggtgctcagtaaaccaaactgaacaaaattgtggtcagagtttcctataagtaaattataaagagtggtggtgtggccctgtagtcccagctacttgggacactgaggcaggaggatcgcttgtgcctaggagttcaagaccagcctgggcaagatagtgagatcccgtctcaaaaaaaaaaaaatacaacagagaaacaccttggattcatttttttttttggtcacatttctttctgtttgactttgaaatttgacttatacaggggaagaatattatagaagtcctaagcttacctggatctattttagtttttcataagatacaatttattgtgtataccggctgggcgcggtggctcacgcctgtaatcccagcactttaggaggcccagttgggtggattacatgaggtcaggagtttgagaccagcctggccaacatggcaaaaccccgtctctactaaaaatacaaataattagctggaggtggtgctgggtggcctttaatcccagccacttgggaggctgaggcaggagaatcgcttgaacccaggaggaggaggctgcagtgagctgagatcacaccattgcactccagcctgggcaacaagaacgaaactctgtctaaaaaaaaaaaaaaaaaaaaagaatttatatacttaatactatagtgggaaaacataaatatattggctttaaaagaatcaaagactttgaaatgtgtgctttytttttttttttttttttttttttgagacacagacttgttctgttgcccaggctggagtacagtggcaccatcacagctcactacagcagcctcgccttcccagtctcaggtgattctcccatcttagtcttctgagtagttgggaccacaggcacgtgccaccatgcccagctaatttttttttttagagatgaggtcttgctgtgttgcccaggctgttctcaaacttctgggcttaaacaatcctcctggcttggcctcccaaagtgctggaattacaggcatgagccaccacacctggccttgaaatgattttttttaaacttcatgaatacaaacaaatgtattatcttctgcagcaatccaagccagtgttgtatgtgttatttcttgaatatttggttctggtggagctggggggttggtgacaaggagcagaggagaggcctgggatgggagctgcttggtgcctgttcttgcttcctgacactgggtggaggtggtggcatcattactcttgagtctttgaaacagatcaaggtcatgccaaggctgggtgagcagagaaagacagtgtcttttttttttttttaagacagagtttcactcttgttgcccaggctggagtgcaatgatgcgatctcagctcaccgcaatctccgcctcctgggttcaagcgattctcctgcctcagcctcctgagtagctgggattacaggtgtgcgccaccaaacccggctaatttttttgtgtttttagtagagacagggtttcaccatgttggccaggctggtctcttaactcctgacctcaagtgatccacctgcctcagcctcccaaagtgctgggattacaggcgtgcactaccacgcctggctaaatttcttgtatttttagtagagatggggtttcaaccatgttggccaggctggtctcgaactcctgacctcaggtgatccacccgccttggcctccaaagtgctgggattacgtgctgtaaaggcgtgagccaccgtgctggttcccccatccccccaaccatcttgtcagtcacaagaatccagctttttctgtggtcagtaggatcagcagcctggatttctgtagtggcctttgttgactcaggagtgtgatgtgctctgccgccatgcacctgctgcagtcgttcttgctcagggaaaaccgacacgataaagtgtaaattgctatattttcctgttgtctccttctttttccccactgggcaaacctccctttgttcttactgtcttagtgataagtgatggatttgaataacctggagaatttttttttaaattattgtggttaaatacacataacataaaatttaccatatttttttccttcttattttttttaaatggagacaaggtcttgctatgttgcacaggctggtctccargttttgggctcaagtgattgctcctcctgcctcagcctcccaaagtggtgggattacaggcatgagccaccgtgcctagccctattccatcttaaccattgtgaaatttacagctcagtggcattaaatacatatataatgtataaccatcaccactatctagttccagaactttttcattatcccaagagggaaccctataccaattaaacagtctcttctcattttctcctgctctcagcccctggcaaccacgaatctactctctatctgtatagatttgcctgtaatagatatttccagtaaatggaagcatataatatgtggccttttatgactggcttcttttgcttggcataatgttttcaaggtttatccatgttgtagcacgtcagaacttcactcacttttatagctgaataatatttcattgttcatatcacattttgtttgtccattcgtccactgatgggctttgaattgtttccaccttttccctatttgaatactgctgctgtgaacattttgtttgaacatctgttttcagttctttttggtatatactaaggattggaattastgggtcatatggtattttaggtttaaccttttgaggaaccaaaaaaagtttcaaacattaattggtttgccttttaaattgagaaatttaaacattgtatttatttatcgtgtacaatctgatgttttgaaatacatatatgtatgttgtggccgggcacggtggctcacgcctgtagtcccagcactttgggaggtcgaggcgggtggattacctgaggtcagaagtttgagaccagcctggccaatgtggtgaaaccctgtctctactaaaaatacaaaaaattagccgggcttggtggtaggcgcctgtagtcccagctacttgggaggctgaggcaggaaaatcatttgaacccgggaggcagaggttgcagtgagccgagattgtgccactgcactccagcctggtgacagagtgaaactccatatcaaaaaaaaaaaaaaagagaaagaaaatatgtatacattgtggaatagctaaattgacctaattaacgtatgccttacatcatatagttaccttttttgtctctgataacttaaaactctctccatgatattcaagtatataatacattgttattaactatatgttgtagttaccatgttgtaaaatggatctcctgaaattattcctcttgtctaaactgaaattttttatcctttgaccaacatctccccgctattccccctcccctcagccccggtaatgcccattctactttctgcttctgtgagttgggtgtttttagattccacatgtgtatgtgagatcatgcagtatttgtctgtgtctggtttatttcacttaacataatgtgcttctggttcaaccatgttgttgcaaatgacaggatttcctttttttcttttaaggctgaatagtattccattgtgtggatatagcacattttctttattcatccatcagtggactccaggttgattccatatcatggcagttgtgataatgctgcaatgaacatgggagtgcacatctctctttgacgtgctgattcattttatttgactaccctgcagtgggggttgctggatcgtatggtagttttattttttagttttttgagacacctccgtactgtcttccataatgactgtactaatgtacattccaccaacagtgaataagggttcttttttctcttcatcatttgttaccttttgtcttctttgataatagccattttaacaggtgtgaggtgattttcattgtggctttaatttgcatttccttgatgattagtgatggtgaggagtttttcatatatacttggacttttgtacctttgggttccacatcttgaaaatatttgggaaaaaaaatggatggtggcatctctactaaacactatacagactttccttgtcattatttcctacacaatattatgtaacaactatttacatagcatttacattgtattaggtattataagtaatctagaggtagcgtaaagcatgctggagtctgcrtagattatatgtaaatattatgtcattttacataagggacttgagaatctatggattttggtcttctcaggaggattctagaaccaatctcctcctggaaaccagggaggactgtacctgttggccatttgagcatctgcctttgagaaatgttgattcagatcttttacttgtcttttaaatggattgttttcctgctattgtttgaatttcttgggacttttttaaaaaagcagtttggttttatttccaaacacaggaagctcttactcctcagaaatgtattcctcacatcatcgtccggggtctcgtgcgtattcgatgcgttcaggaagtggagagaatactgtattttatgaccagaaaaggtctcatcaacactggagttctcagcgtgggagccgaccagtatcttctccctaaggactaccacaatgtaggtgattrtagctttagcgatagccttgccattgatcaggacaaacgctagtctgttgctgttaataaatatagtaaaagccacattatcaccatraaacttaacagaagcaaggctttcgcagaatgtgtttctcctgaaaggagaatatcaagcactctttccccagattgtagggaaaaaggraagggagtaataagmcaagtgccaccacattctttaggaaaataactttctaaggmcatcaaagaaatgtaaatgaacgaatttgctctgcagttccggaacaactaaaacaggacgttgttatcatctgctctaattggacttttgtttcttttctttttaagaaatcagtcatcattatcggggctggtccagcaggattagcagctgctaggcaactgcataactttggaattaaggtaggattttggggacatggagttagaacagatggttgactgctccttttggtccaaatttctaagatttagaaaccagttcctatttttagtgaagaatactaaatacattatatgtttatattaggtcctagaaaagttataaaacttgaaattgatttcataagaaaaaggtaaatagaaattctcacagctttrgagataattttagactctaatgagcaagtcagaagaaattctaacttggcattaaagtagaaattcttttttttttttttttttgagacagagtcttgctctgtcgcccaggctggagtgcagcagtgygatctcagctcaccgcaacctctgcctcttgggttcaagctgggattacagatgtgtgccatcatgcccagcgaakttttgtatttttagtagagtggrgtttcaccgtgttggccaggccggtcttgaactcctgacctcaagtgatctgcctgccttggtctcccaaagtgctgggattacagatgtgagccactgcacctggccaaagtagaagttcttgacagattattattcgcacaatagacatgatgagaaaaagcccgtttccgcagtagtttgagacagcaaatagtagcatggatattcattattccttgtgtaaaaaagtttctgaaatactcagttctaagttttttttttaaatctatttatttattttgagacagtgttatgagactggctaatttttgtatttttggtagagacgggatttcaccatgttggcaaggcaggtctcaaactcctcagttaaagcgatctgcctgccttggcctcccaaagtgctgggattacaggtgcgagccactgtgcccggcctccagttaaatttttttatgcccgtcaaaaacrccctttgcggagcttgcagtgagccaagattgcgccactgcactccagcctgggygacagagcgagactccatctcaaaaaaaaaaaaaaaaaaaaaaaaaacgccctttgaatctcatttcagacatgacccactgctccaggcctagcacatgtttcagttgattgtttatttcagtattagatatttgggccaaggttatttgagttttacttgggaaacctacagattatattacaaggaaggttattaaaatccaaaatctaggcaggctagtctttaatgttcagccttcctcttatactaaaaaaaaaactagaaatgggctgggcacagtggctcagtgcctgtaatcccagcactttgggaggccgaggtgaggagatcgcttgagctcaggagtttgagatcagcctgggcaacatggcaaaaccctgtctctaccagaaaaaaaaaaaaaaaaaaraaaaagaaaaaaacagaaaattagccgggcatggtggtatgcacctgtggccccaggtattcaagaggctgaggtgggaggatctcttgagtgaaggaggcagaggttgcagtgagccgagatctagccaccgcactccagtctgggtgacagagtgagaccccaactcaaacaaaaactagaaatggatggttctgtcagagaaagagggtagaactacaaggtgcagccttcctagttagagaaagtgaagaatgtaagtttgagaaagcagtttggagaatcaatattcctttccgccccatccccaagtgatgggggagatacccaggagaccctccattcccgccatgggagggaaatagattcctctgagtagcctgaaagatggttaacttggggaacctctccttgagaatttcaagtagtttctagagatccagaagtgaaagactggccctgcgatgaataggactcacattttcaggtaatgcagctctgggaatgtggcactaggcatccagggctgcrggtgacgtgctgcctgtgcacccaagagcagcttctcatgccaccagcattagaaatttgggggcaataaaatagcctgggtatgagacagacctcattaggccaagcccatgaagtaatatttatatggagtggcatactttttttttttttttttaaataatatatcttagggaagttaaagcttatttgcagtcctaaaggaattttgctatgtagatatttcttaggaaaaatcacctaaagaagtttttaactgcttcttatggaatactattttataaaaagctttcaaagtacatttcatgtactagttcattaaatctttttgttttttgagacaaggtctcactctgttgcccaggctggagtgcagtggcacaatctctgctccctgcagcctccacctccagggttcaggtgattctcgtgcctcagccacctgaatagctgggattacaggtgcatgccaccacacccgactatgtatttctggtagagacagggtttcaccatgttggccaaactggtcacaaactcttggcctcatgtgatcctcctgcctcggcctcccaaagtgctggtattacaggcatgagctatcgcatctggcctagttcatcaaatcttagtatctggtttgagtgattctttcaacagaccactcagtttttcctcgctagagtctagatggattgttttgaacatctattttggcttctcttcacactgcctgctttttaaagttgtttttttagaaatatttggaattaaccaaatatagaggctatttaacagtgtccttctacatttttataatactgtgtctgatataactcttgtgtcctatttagcttccctgactgtctgtctttttaggtgactgtcctggaagccaaagacagaattggaggccgagtctgggatgataaatcttttaaaggcgtcacagtgggaagaggagctcagattgtcaatgggtgtattaacaacccagtagcattaatgtgtgaacaagtgagtttcttttagctttgtgttgtakataaaggaaagaaaaacagtttcaatttgcttgtgtgcagtattaatatgcttctaaagtaaattacatrtaacagccccctcatctcctatgcaaagcagtaagaattacacttctgcctttctgagaaggtagaactagaggatgtaaaatactttttttcctttttctaagctatttaattttatttccttgttctttgcaggccacttggttatctcataattttagagttgccagatttagcatataaaaatccagaattctcaattaaatttcattttcagataaacaagtaattttttacccaagtatttcccagtattacatgggatattttacatgcaatatttgggacatacttatacttaaaaaaattatgtattactaatctgaacatcatatttaaggaggcagcctgtctttaatctggcagtcatagagagtttatttgaagagttggtaggcccragactttttctgaaatgtttattgatggtcaattcaatttcaacttctgctatgagtgtttgtgtgtttgtgtgttcatttacatgagggtccacagaggagacagaatgtttgagcaaggacaggcagtgtctagcatctgaaacattagccaaaaagttacaatgggcatggcgtaggagctgttgctgcccctctcacrttctcatcaaataaaatcttgtagatttcatgctgttttttttcactgcctgactttgctgccattccccgtgaagcatatttagctttatttttgagagatatgagaccattttctccatgagagctctgtctgattttcagcttagaacctgtaaatatttttttccagggaaaattttcaccttcttattcttattattttgaagcttggcatcagcatgcataaatttggagaaagatgtgacttaattcaggaaggtggaagaataactgaccccactattgacaagcgcatggattttcattttaatgctctcttggatgttgtctctgagtggagaaaggataagactcagctccaagatgtccctttaggaggtatggggagaacggtgttctgattgttccatctcagtttcgttgttacctaagcttcatcagcagtggcatygttcatttgcgaggtcggatgtcggcaacagggtagccctcctgagcatttcttttggactgatggattctccaagttctcaggggaggagaactttttgtagggaggcttagatgcttgtgttgtgtacacacacacacacagaccttactttacacaatagctggtgttttacaaaattacctacgtgtttaattttaaatttcccagagtagcttacttttatgggaacatgtggtaagccctgtgtgataaatcatcaccctgtaatgtcttttctaggtaagrgtttgtgtgtgccaggatttctttttgttgagcagtgagttaaggttttttccagtatattttaagaatgcaagagtattacagtttaagaattttaacccattaggcacagtggctcacacctgtaatccgarcatttgggaggtcaagcggggaagatcacttgagtccaggagttcaagaccagcctgggcaacatagtgagccttgtgtctacaaaaaaaaagggsggggggcaagcatggtggtgtgtgtctgtagtcccagctactcgggaggctgaggtggaaggatagctttgagctgaggaggttraggttccagtgagctatgatcccaccactgcactccagcctgggcaatgaagcaagaccctatttcaaaaaaaaaaggaattttaattcaaaatcttttggcttttgtacttaaatgggcaatattagccacaactatttagaaaacttgaccatccatagtggctcattttcacgagggtgccagcttaaattttactgtattgcttcttaaattgatatttatttggcctacaattttgtgacctgaatgtattcacttgtagttcttggaggcatgttggagtttcttgtagtgtgaacattggaactcagtttgcaaggtgttaatttgcttcaactgtatgtttctttgcaagagctctcaattcttcaggctgatatacagttcatctctgtttggggtaaacttcttagtagcagggactatgtatctcttctttttctcttttcccttcccctctcctgtggcaacccaccacctctaggagacctatgctgtaatcgtccttagtaagttttgactgatayactacaagagaacattttcagaaatatactcycgtcaacagggatcatttaatcaaatgttgtagtgtccagactaattcgtaagttgttaaatttcctggagttgagaacagttattaggctgacgtgcaggatattctcaggacttggttagtgttttgtacctgtgttgcagtcactggctggagttttcattacatgtctttcagagtcaccatataaaaatgtttaatgataatgctttgccttacccttacctagaacaagctgtaggccaggcatgatggtgygtgcctgtagtcccagctactcaggaggtgagaggatcgcttaagtccaggagttagagactgtggtgagctgtgatctcgccactgcacctcagcttgggtgacatagtgagacactgtctcacaaacaaaacaaataaaaaacccaagttgttaaggtaggctcagcaattcttactgtgtaagtgggtatttcatcttatcaatagcttgtttaaaagctttgatagtagtgcacacatctctgtgtaaggctatagttatatcctgcctgttggtatcttagctgtctgagatctcatcttaccagcacaaagctggggaaactcaaatctaaatactaagggactagatttcatttcagaaagcatgtgcactaaagctgttttaaatattatttacataaaaatcacactgtgctgggcgcggtggctaacgcctgtaatctcagcactttgggaggccaaggcgggtggatcacctgagttcaggagttcgagaccagcctggctaacatggtgaaaccctgtctctactaataatacaaaaattagtcgagcatggtggtgcatgcctgtaatcccaggtatttgggatgctgaggcaggagaatcacttgaacctgggaggcagaggttgcagtgagacaagatcaggccattgcacttcagtcttgatgacaagcgaaactccgtctccaaaaaaaaaaaaaaaaatcacattgaggcctctctcagtctgtttatacactatcttagcaatcttggtttttctccccgccgcctccacaaaaccaacaggaatgtagaaactgcacagcaggaagcggggatgggacttctacaaaagtcacagaaagtggcacaaagcccaggggtctaggagcaacaaagacaggcacaaatctggargcctcttgggcatccgcatgttacaatctagtgcaagaactgaacattttgatgaaagccttgagctgttctaaaaaaaaaaatatttgaagtaactgatactcagttctgcttctagtcagagaagtgtgtgacactctgttaaacttgggattacacctgtaatcccagcacttcgggaggctgaggtgggtagatttcttgagctcaggagtttgagaccagcctgggcaacatggtgaaacccatctctactaaaaattcaaaaattagctgggcatagaggcgggcgcctgtagtcccagctacttgggaggccgattgctggagccccggaagttgaggctgcagtgagtcggaatggcaccacagcactccagcctgggtgacatggtgagaccctatctcaggaaaaaaaagaaaaagaaaacaccaccagaaaaagaaacgtggagtctgtgatacatgttttggatggttgtcatcactggaacagttgtaaagaagtaacctgtactgagatgcttagaattagtcagacatcaagccagaaccctcttccagccctgctataaaggaatgtaaracaaaaatgatatcacagggctgtgtccatatagttacaaggtccggttgagtgggacagataagtaagggctggagttgatgacagggagaaattctgggggcttgccacggcccggtgatgcccgactataaagaatggatgggattgggtgggagaaggcattcccrtgagggagagtgggaggtcgcagaccctgcagggtaggaatttaccaggaaaaagattcaaagcattacagcagagcctgcgagtgggcagatcgtagctgctgcctttggaaagattaaaatgtgctagctttgcctggctgtggttggggaatttattacataggcaaccagtaattgtagatatggaggcggagtgctgacaagatacaagcccataatggaatattcttgtttgggacagactgtagccaataggttacaggtctcttagttgaggtgagatgttgtaagcattgactttaaggtgatggcagcaggaccagaaagagaatggtaacttctgtgtgtgtgcatgtacatctatgtgtggggacagtttttctgtatcttgagcaaaagaggaaaccacttctcaacgaagcgaaattgagacgtttctgaagatatagaacttacatagctttgtttcyggttgtgcacatgtaccctaaaacttaaagtataataataataaaattaaaaaaaaagataaactttctcttcctgagagaaatggaccttatcaagagwtcttttcccctctgactttacttgggaaaagactttggaagttttgggtgttgctgggtgacagaggttgaaagcaaaggagaaagaattggagaatcttgttaaagctatttttttctgctttgatccattcccattacagaaaagatagaagaaatctacaaggcatttattaaggaatctggtatccaattcagtgagctggagggacaggtgcttcagttccatctcagtaacctggagtacgcctgtggcagcaaccttcaccaggtgcgcttgggttttgtgaaaggtgtgctttgaaaatacttggtttaggccgggcgcagtggctcacgcctgtaatcccagcactttgggaggccgaggtgggcagatcatgaggtcaggagatcgagaccatcctggccaacatggtgaaacccygtctctactaaaatacaaaaaattagccaggcctggtggcgcatacctgtagtcccagctactcgggaggctgaggcaggggaatcgcttgaacctgggaggcggaagtcgtagtgagctgggatcgcgccactgcactccagcctggagtctcaaaataaataaataaataaaatacttgtttttgtgtatgtgtgtgtgtgttttgtgtgtctaaatattgaatttgagctggtttcgataaacaggaaagaatgattctccttaaaagtttgaaaaccatgacttctgagcatattaaccccacagtggttttggttgttttttaaacttttttttttttttaagcaagagaaactcttcttcagataatgcttgtgaaagaagctcaatacgtaaaaacaaaggaagaggctgggtgcagtggctcccttctgtaatcccagcactttgagaggccaagacaggcggattgtttgagcccaggagttcaagaccatcctgggcaacatggcaaaatcctgtctctacaaaacatacaaaaaattagctgggcttagtggcatgtgcctgtagtcccagctaagtgggaggctgaggtgggaggattgcttgatcccaggagttcaaagctgcagttagctgtgatggtgctaccacactgctgcctgggcgatagagtgagaccctgtctagggggagaaaaaagaaatcaatcactccaaaggaaggagggctattgggctgaatcagakcagggtctcttatgtttttcttattttttgtagagatggggtcttgccatgttgcctagtctggtcttgaactcctggtctcaagtgatcctcctgcctcggcctcccaaaatgctggaattacaggcatgagccactgcaccaggacttgtctctttaccgtcctttccctgccctctgcagagggccttgggtcatttctgtggaaccgtggagtcggaaacactgctctcgagaagccaaaatagagtatccttgcaagtctggtctgtttaccttgttaaagtaaatttaagcttgcctaactcatttaaccaactgtgaacttaataccccagtattctgtattttgaatagaactccacggatgatttcasaggcccctttgggacctctccatttccacttggttctgcattgtgattggartcatgctattttccaaaatcgtgcagggtttctattctgtagagcttccatgttgaggacagatagcatatttatatatgttgatcaaatacagttytaccctcatagaattctactttgccagagttgtcaatatagaaaatcagcttctatttttatcaaggagtggtacccatgtccaagtcatatggaccttttgttctcaartaaactttcctcaaataaaattaycgagatttcctcccccagtggtggtctctgcctaggctrgtctgcctgtcccctgccctcctgccttggtggctgttcccacctggagctcctcatattggctctcaggcacaggcacaaggatttacactgctgtgtccccaacctctcttgtttcccaggtatctgctcgctcgtgggaccacaatgaattctttgcccagtttgctggtgaccacactctgctaactcccgggtactcggtgataattgaaaaactggcagaagggcttgacattcaactcaaatctccagtgagtatcaactgctgggaggctctggctcgccttgtttggggaggatgtgaagttctgggcatgcggctcacgcaggagaatggggctggctttggtgtttagccagggtctasaagtacttttgtggctcattcgtagcctgtgtagcattatccatgtcagtgaggcagctgctgctgcttggaaaccgtagtggccccagtgcatttctattaagaagaaggtattcaaattgcttcgcaactttcctaacccagtgcagttattttcactttaaaattttcccttcaaatctttgtctcagtgcatttgtattgtgtgttattgtaatcatgggggtgattacttaactgtatttcccttcacaccatattataactatcttctatattccgacacaatgtttattttgtatattctgacasagtataaattctaactccctcagttcagctataacaattgtttagatctctgaatgccaggaaaagattccccttagccttggagatgtaaattcatgtaatatgagaatcggaaaggatcctggatcacrtggttccatccctcactttttttcataattgctttttgagcaggtgcagtgtattgattattctggagatgaagtgcaggttaccactacagatggcacagggtattctgcacaaaaggtaagagctagggcagtacaagggtgggtagaaacctttgctgccaggggcttggagggaaggacaaatctttcctatcaaggagtttgcctttgggaatctgcctggacccttgttggatttctggtaagttatgtatctcyacttaattgtatgtagatatgcaaagctgatttcattgctctaacactgtatagactcatggcagatggaattctgaattgtgttccttgaggtgagttctagggcacattagtcctgagagttgaacaagaaaaaaaattccttggccaaataagttaggcaaggccaagtaagtttgggaagtattgtatamgatactctacttttaggattaaataggagttgtatagggttaaatagaagtatgtgtatgtgtrtrtatatatatatatatatatatatatatttttttttttttttttttttttttttttttgagatggagtctcgtgctgtcacccaggctggagtgcagtggygcaaactcggctcactgcaagctccgcctcccgggttcacgccattctcctgcctcaacctcccaagtagctgggactacaggcacccgccatcacgcctggctaatttttttttttttttgtattttttagtagagatggggtttcaccctgttagccaggatggtctcgatctcctgacctcatgatcckcccgcctcggcctcccaaagtgctggggtwacaggcgtgagccactgtgctccgcccaaatagaagtatattaaaggctctgagaagtcctgcattaaagaaatctattttacttttattctgtgctctccacatttttttaaaccacggaatccttcttcagatcaggaaagttctgttttcatcttgaaatcttgaaactatcagaagtactttcatatggcttaaattttttgtaaacagctttatagtaggtgaacagtacaaggtactgctgaatcaaatacctgaaatcacactgagatttatagtattggagaataaaggtgcctccttggggtagaggggatttagtaaaccttgaaaatttaagtttagttatatcttaagtgactatgaaaaaatataattgatgaactatcactagttcctagactagctatgcttcctacayttcaggtatctaaaacttatttcatagtccttgattttcatacagaagtaaaggactgcatgtcacatgggaaagacaggtctagggaatgagttagtcgrggcaggggatcctaacattattcctgccattaaccaactcggagatcttgggcagcaatccccgggctgcacgtcggaaccacctgggaggcgcttacaaagaaaggctggaaagccccaccctgatgcgttcttgttgaattggcctcgcttttttgtttgtttttttcagagacagggtctcagtctgtcgcccaggctggagtgcagtggcacagtcatagctcactgtagcctcgagcaactgggttcaagggatcctctcacctgagcctccctcgagtagctgggattacaggcatgcaccaccatgcccggctagtcatgtttttaaagcttctcaagtgattccagtgtgcagccgtggttgagaaccttgtctgcagtgaccttttctgtaagctcttaataggttttgcctggtgrtaaacagtgtttaaaaatactaccttttaaaattgcaagtcacccgacagttcagcctctgctgttctgtagctccacttcttggtgtccaggacagcaagctggttwtaactcccctgctttgttactctctgcctgaccctggccagtacttgtgcgtttctgtgtttgtattccagccttctggagaaattagggcacagcttcaggctgcactttgaaatgtttaaaacaaatatttttattgtagctagcacgcaccacagtttgcattggaagtttccccaaacttgtaagagaataattttcaacccaacgtgatagaccgatgaacctccagcagactaactcagtctaggctgcttccattgacatctcgcttttattacttactaggatgtgtttatatcatttgcctatttgtttacccaaggcttttctttcttttttttctctttcttttcttttttttttttttttttttttttttttttgttttacagggtcttattctgttgcccaagctggagtgcagtggtgcagcttgtagctcacagcagcctcgaactcctgggcttgagcagtgctcccacctcagcctcctgtgtaactgggaccacaagcacatgccaccacactcagctaattaaaaattttttttttgtagagacagtgtttccctatgttgtccaggctggtcttgaactcgtggtcttaagcaatcctcttgcctcagcctcccaaaatgctgggattataggtgtgagccactgcacctgggctactcaagttcttatgcttttcagtgctattttgtcattaagaaaacatctagatttgtgggcgtgggtggctcatgcctgtaatcacagcacttcgggaggctgaggcgagaagatggcttgaggccaggagtttgagaccagcctgggcaacatggtgagaccctgtctctaccaaacataaaaaaattatctgggcatcgtgctgcacacccatggtcccagctactacaagaagctgaggcaagaggatcacttgagcacaggagtttgaggctgctgtgagctgtgatcatgccactgcactccagccggggcaacagagcaagaccctgtctctttaaaggggaaaaaaatctagattttatttattttcttgcaatttaattggatagtaattggttttttgttgtggtttgcctcattttttttggttgcatggtaattatctataaatagattataaacttcttgatgatagagagcatattttatactttataaaaatattttcatgtggcagaaaatagtgacaaaatcagagaactctgaacttcctgtgatcctagaattgagagttaagccaaatatacaaaatctttgaagcctcaggtagattgggtgcttggtcttcaactccattccactctgatcctagggtgtcatcctgtactgcagatattagaaagcaaatacacacactcttccccaactccctacagcaggtttctaaacatccatccagcccagccaatctgatgcacttgcatgagatgtagaaggtgtaggttgactttcgcttcccttctgctgcctctgttgagagcacacaatgctggaggtgtttggttcttctgcagcagggttcgtgaaagttgcagggtttagtcagtaaccacaagtcaagaaggaggccgtaaggcatgcatgttgctggtgcacgtggttctgtatgtggcatgattctggagctggcagtagtagtaatggcgtcctgattgtagcaacgataatggggtctggagccagaaatgtccaattcccaatgtttgtgatgtgtttcactacttatgaagcatattgatgtatcttgtaaattttagttttaaagcatcaccctgattctcagaggttagtggggcagatactaccttcattttatagatgtatggcagagatgagtggcaggcttggccacacagtagaatgtattaggaatgatgcataaagttctcctgactccatagttagggctctttcctcctcaagtactgcttttcggggttttgttttttttttttttttgagacagtctcgctctgttgcccaggctggagtgtagtggcgtgatctcggctcactgcaaactccgccttccaggttcaagagattctcctgcctcagcttcccaagtatctggcactacaggcacctgccaccacacctggctaatttttgtatttttgtagagacagggtttcaccatgttggccaggctggtcttgaactcctgacctcaggtgatccacccgcctcggcctctcaaagtgctgggattacaggcatgagccaccgcacctggcctctgctgactcttcttatctaagatgattattcaccatcaggacgttttttgcccactcttccctgtggttgccacttctgcttagccaggcattggcacccttgtgcagtgagcaacctgcacagttgcacatggcagcccttgttcttgccagtataacagcatgggttgttgataccagtgtagtggtagtgtgaggttctgttgctgtttgtttgttaactgttaattattttccmcaggtattagtcactgtaccactggctttactacagaaaggtgccattcagtttaatccaccgttgtcagagaagaagatgaaggctatcaacagcttaggcgcaggcatcattgaaaaggtgactgaaatgacctcatcctcagcaagaaagagattaatgtcagatgatagatgttaacttctgatatggagaagtagtgggtactatctaaatacaaataaaactcaaggatttccttttcatttgagtaattgttcgtgaagaacacagaagaatattatcaaaacgaaaggaggagagctggctgaggtctgtgagttttgactttaggagaaagaatcttgttattcacaatttgaatttggtataagcaattcttttatccccttttttccccccttctgctttctttcttgtctgctttccactcattggccccagtgaggacagaggtttatttctcctgcctttaatatctcctgtagcagaatgggccagtgctgcagcagattctgacagacctatgagtagtgagagtttaacttagggacatacgcccaggagtgagtcttaggaatgctgggcatcttcagactagcttctaggttgccagtgggttccattatccatgggaatggaactgagtggcatcaaaagcaaggagctgggctgggcacagtggctcatgcctgtaatcccagcactttggaaggctgaggaggayggattacctgaggtcaggagttcaagaccagcctgaccaacatggtgaaacctcatctctactaaaaatacaaaattcgctgggcgtggtggtgtgcacctgtaatcccagctacttgggatgctgaggcaggagaatcactcgaaaccggaaagtggaggctgcagtgagccaagatcgctccattgcactccyagctgggcaacaagagcgaaactccgtctcaaaaaaaaaaaaaacccaaaaaacaaaacaaaacaaaaaacaaccaaggagttcacagggggaaaaaaggaggtgaggagaatggaaagagcggtatttggggttgttctttcgggcagtgtctttgttttagagtagagctacaggttgctgcttagatattgcctgtggttttgtgacgacagacacctaaccacctttcttctgctcactttgcagattgccttgcaatttccgtatagattttgggacagtaaagtacaaggggctgacttttttggtcacgttcctcccagtgccagcaagcgagggctttttgcygtgttctatgacatggatccccaggtaaaatcattcgtgaactgtggtttgaatttccgtcttaaagtttagaatttgatgtgataattactcacctatcaagctcaggaactaacgaacatcatggagaccctgggtctatgtttatattctgggaggacacttggactggacattttcctataggaaaggagccccagtatttgccatgtcttcttaaagtcctcatgttgctccctgggacatgaattggatgcttgtggaaactgtcatttcaggctatgggggaattcctcttaggtgaagttggagacatcagagtcaatgagtggtgcttgaaacttcctctctgagggtcctctagggagctgggaaagggtgtatgattggtgagggagggtgtgagtgtcagcagatgtgagagctgagggaaggaaggagagaggagaatggcatacccagagctggacgggggtggtcactttctctgccgtcatgtcactgccacacgaaagaatcatggctgtttctgactttcagtttcaagaaactttgtcttaaaaggtttcacataggagccgagggcagattttctttaccatttgaggtttttttatttttcattgttttatctgcagattttccttctccatctctttctacttcttccgaagcaagctttaattagtgaacagccaagggaaccttaaagttgctatttacatttcttagtgtttttcttttccagcaggaagcaatagagtggatggatgaataatgagtgtttgcgaggaaaatggactggcgagtgacgtgcggataagggacagccagaaatagtgacatttaacttgtgagagtgaggctcttggccgggtacagtggctcacgcctgtaatcccagcactttgggaggccgaggtgggtggatcacctgaggtcaggagtttgagaccagtctggccaacatggtgaaaccctgtctctactaaaaatacaaaagttagccgggcatggtggcagacgcctgtaatcccagctactctggaggctgaggcaggagaatcacttgaacctgggaggcagaggttgcagtgagccaagattgcaccattgcactccagcctgggtgacagagcaaaactctgtctcatttaaaacaaaacaaaacaaaaaacaaaaaaaaagaggcccttatctgtgggagctgagcactcasagacctcctgcttttcctttcatgtctccagaagaagcacagcgtgctgatgtctgtgattgccggggaggctgtcgcatccgtgaggaccctggaygacaaacaggtgctgcagcagtgcatggccacgctccgggagctgttcaaggagcaggtgagagagaggaagccctccttgaaaggggcaagccgtgcttgctatccagagcaggtgtgaagcccaagcagccagcgtcactgagaatcacaggaaggaaggcagaggccacagtcttctttctttcagagtcccactgcccacctcagcactgagattagtctgtgagggctgtcatcacagagtaccgcagactggctgccttagacaacagaaacttattcctcacagttctggaggctggaagcctgagatcgaggtgtyggcagggttggtttctcctgggtcctctctgtttggctggtagatgctgtcttctccctgtgtcctcacatgggcttccctctgtgtgtgtctgtgtcctcatctcctcttcttatgaggacacaaatcagattagattaaggctcaccccggcgacctcactttaaagtaattacccattggagaccatgcgacgaaatacagtcacattctgaggcactgagggttagggtgtccacatgggaatttgagggagacacggttctgcctgtaacagtgccctgtacctttttttacacaattgtcttccttcctttttttcttctcacatcatacacacttccctttttttttttttttgtaaggatataaaaggctcggtattttctacgtggattctatatttactgaagccctagaagctttgactacagctttccttttaagaggagccttggccagctttttttaatatcgcacacatgcagatagtctcttttctccacggagctcaggatactttgtttgccagtgtactaaatctcaccatctctggagatttgtaaatggccatggcttayatctttttgaaataaaggagcagaaatagaagtgaaatgactcaaaagttatgtaagttaaagagaaaggggcattcagatatgttgcttattttatttcattttaatttatttatttttgagacagagtctcactctttcgcccaggctggagtgcagtggcacaatcttggctcactgcaacctccacctcccgggttcaagcgattctcctgcctcagcctcccgagtaggctgggattatgggtgtgctccaccacacccagctaatttttgtatttttggtagagacagggtttcaccatgtttgcctggctggtcttgaactcctgacctcaagtgatccgcctacctcggcctcctaaagtgctgggattacaggtgtgagccactgtatggccagccttgttgctaattttatatgagaggatctatctaatgatgcaatcccttgcttggggtttttgttcagaagtttgttttttacattagttgtttggaacttagcttaccgtttctatagaaatattgtttatcgtgttgcttgttggaggccagctgacaaattacagtcgytctctcttactcgaggctttgctttcatggtttcagttactgtggtcaaccaaggtctgaaaatatttgatggaaaattccagaaatagattcataagttttcagtcatgcaccgttctgaagagcgtgtccagtacctccacactgtagacattgcctgtccattagtcactcaggagtcatctctgttatcagagccatgttcacataccttttatttcagtatagcgttataattgttctattttattattgtcattaatctctgtacctaatgtataaatgaaactttatcataggtatgaataggaaaaaacatagtgtgtatagtattggtcctatccatggtttcaggcatcccctgcgggtcatggaacatattcctggcggggaagaggggactgctgtattttaaattgagtgaatgtgaaacataaccttgtatcactgttttgtggagaaccctgttgagaattccaacctgtgatcctgagactccatccttcccttttcttcttgggccagagactcctttctgctaccacacgatggaaaagggaaggcccgaactcttagccatgggtgatagcccccagtagagggagagtgtgtcccgggcagaaggaggaggtatagaagtgagggaattgtgtgtgggtggggcaggaaagagaggataagacacaaataccggcttgggtagatttaaaggcagcaggaggaacatcttgagaactactgtttcagaatgatacaggaatagactcaggtcctaaacagggggcaaaatgtatgagttgggttgtaccatgtctatctcccttctttttttttttttttttgagatggagtctggctctgtygcccaggctggagtgcagtggcgcgatctcggctcactgcaagctccgcctcctgggttcacgccattctcctgactcagcctcccgagtagctgggactacaggcgcctgccatcatgcctggctaatttttctatttttagtagagatggggtttcaccgtgttagccaggatcgtctcgatctcctgaccttgtgatccacccgccttagcctcccaaagtgctgggatgggactacaggcatgagtcactgcgccctgccatctacatcccttcttgatcctacttcataattcctttctattggacataggaggtcccagatcccacaaagtattttgtcactcggtggagcacagacccatggatccagatggcatacagttttgtgaagacaggtggaagtggggaggcctacgatatcattgctgaagacattcaaggaaccgtctttttcgctggtgaggtatggatcttgattccaaacccaattatttgtattttgatttctgtctttcatctaaaatgatatctgcccagagtttaaaaaccaattcaaatactgtcaaaagtcttatgaccacagacagcagaagccttctcaccatcctcttgctcccagaggcagccgtttttaaccttccagctattccttctggacttcacttcatattttaaaagtgtttatattgccatctctctttcttttttgtttttttgagacagggtctcgctctgtggctcagactggagtgcagtggtacagtcctagctcactgcagcctcaaactcccaggctcaggtgaccctcccacctcagcttcccaagtagytgggactgcaggcatgtgccaccaagcctggctaattttttttttattttttgtagagacggggtccgcagtgttgcccaggctggcctcaaacccgtggccttaagcagtcttcccacctcagcctcccagagtgttaggattacaggtgtgagccaccatgcccagcctatgatgtcatcttctgatttaacattagacagacattattgactgcctccctattgggttaaagacttagcccatttagtctctgcaccatttgctcaacatggttatttcacacttttcattaaattggtattggtatttacatggctgtgtaaatgtcatttactgctgagccaagaaggtgtccactgataccttcttacacagttttctgttttcttggcaattataatggctcctttggtcattagcttaattcctttggtacctctccccatgtctcccataccctgggtttgtctctcatttacagttgacactgtctgagctggccrgctagctccagtccttgaaatgtccccttcctgagtcctcttccctctgctctggtccacactggttgacctctgagattactgcagagtgtcctcctgggtctctctaatttaaatttaatttaatttaattattttattttaaattttatttatttttttgagacggagtctctctttgttgcccatgctggagtgcagtggcacgatctcagctcactgcaagctcygcctcctgggttcacaccattctcctgcctcagcctcccgaatagctgggaccacaggcgcccgccaccacgcccgactaattttttgtatttttagtagagacggggtttcaccgtgttagccaggatggtctccatctcctgacctcgtgatctgcctgcctcagcctcccaaagtgctgggattacaggtgtgagccaccgcgcctggcctggatctcttttaaaatcactctccagcattgggcctttatttctaagatccgtctctttcttgatttacttctgttgaaaaatgttttgctattctgatttctgatccttttacttcactttcttatctgctaaaataaagatgagttttttctctttctttctagagattctgttccatatcttggaacttttgaattgagcatctaatttttcctctttactattattcatctcttatgctacttttgggggagattttaaaatcgtccaactctaattgactttgaaatttttggcttttactttatgagcactttcttgtttgcagaatgttccttttttgtagcatcctcttgttacaacttgtttctaaggttttaaagctttggatgattttgcttttatgctccctccctccctggtttcctcagtctcagagttcttattttgtgtgctgcagtctttgcctgctacatgtccaaatccccgatccatcaccgttgacttagattcgagcaaggcatttttttaaaagctttgtgaaagctccagcaagcttatcaaccagtggccggattcccaaacatcactatctgggaacagttagtttcctgtgtggtggaagctcagcccctggcactgtgggcgctggaagcttcattgttagttatgaaggcttcatttcacttcatccccattttatttggtgcttcgccctgatctctaagtcacatctctgaggagttgcagccggtcaagtggggaatgtggtgagggatgtattaataattgctctttatagtctttaagccaatcctgttttcaccccttgctaacctctgcctccatggttcctcatacttccaatggctgagattttctaaggattctctgggatgaattggtttgctttttgttaaaacccctgcccccaaccccaaacttaaaatgaattgttaccactctttcacctgtgttcctacttcgtttaatatggtttagaagtacacgtctcattgtttcatctaaaatatagttaccgtttttgtttacagaagaataacattggccgggtgcgatggctcacgcctgtaatcccagcacattgctgagacaggtgtatcacctgaggccaggagtttgagaccagcctggccaacatggtgaaaccccgtcactactaaaaatacaaaaatcagctgggcrtggtggcgggcgcctgtaatcccagcgactcaggaggctgaggtagaatcgcttgaacctgggaggcggaggttgcagtgagccaagatcacgccactgcactccagcctgggagacagagtgagactctttttcaaaacaaaacaaaagaatgacatctaaaaaccagatgactttgattactccttggcctatgaagaccttactctgtggcaaggggataaaggctgcatgccagacaacaaatgtcagcagcttcggagagacggctgtttcaggctactgtgccttagggtcatgaacatggcttagatggcttcttgctttcctttgctgctttgatgcgattattacctcaccttttcctttttttttttttgagatggagtctcgctgtgtcgcacaggctggagtgcagtggcgcgatcttggctcactgcaacctccgccacctgcgttcaagcaattctgtttcagctggtgtgtgccactgtgcccagctaattttttatttttttttagtagagatggggtttcatcatgttggtcaggcaggtcttgaactcctgacctcaggtgatccacctgcctcccaaagtgttgggattacatgcgtgagccaccgctccttcttctaaaaacctatttctgaggcttccttccctcactgccactttctccccccactagtcactatattcctgctgatgtaatcactcccccattcattgaagcctttggcccctggatgttttcccttctatccaggcatcagtttaggtgactacacttcacttcacctctccatttcttatcctccattttctgckgtctgttcagctcctcttcagctacccctttccacagccacatctcagaccttgtcataattacttaatcactaattcaggcctcctcctatcctgtcctcccctatcctcctggtttgcttattgttcccaccatagccattccttgagtgaggttctcctattattgagtcgttttacttcctcccaatccaacagccctcactcacattgtctttttcttattgaacttacggtccctggtatatcctttgagtaacgtaactctctacctatttttttacccatctagcaaaagtccatctgtggcttggctgaactgccattcatcttttgtacttgtttcgcctgtgattgtaccagctacattacttgtctgatgggagggactgtgtcttaattgttcttaactctagtacctatcacatatacttagtattttaaagagtgctgcgtagtacttcaagatagcatacaatgagtgaatttgacaatgcatggccagataaccagaaaagttccagtgttacgatgggtgagtgtgaatatgagcacacaggagtggcacaaatctttatgttagaccagataaagtctaaccttgttttaccttttgatatcaactcaaytctatgcatgatctcaaattatgtaattatgttttacaggcaacaaacaggcatttcccacaaactgttacaggggcatatttgagtggcgttcgagaagcaagcaagattgcagcattttaagaattcggtggacccagctttcttctgtaccccagatggggaaatttgaatcacatgttaaacctcagttttataagagggggaaaaaaccgtctctacatagtaaaactgaaatgtttctaaggcgatatgataatgcaaacctatttcatcactctaaaagcactgacctcaaaaaaccttataagcacttagatttaattgcattttccataggttcaactactgctgaaagtctggatttcagaataaagcagaatgtaagtttcagttgaggccatggatttgattgttccatggctggaagttccctttagatttcacattttatatggctgatcaattttcatacattgagaaaccaagtcaatcaagcaggaatcatttaaaaaccagataaagccatgtttttcttctgtgacaatttatcagtatctttaccaatgagccttaatttttatataggtccaatattgagcttttacttaaaatttagatagaacttttttttggatacagcacaaactccagttgacagtaaaatgaagcttctaggtattttgtattgtacatatttcctcctactgggtgttcaaaagaaatttaaattcaagtaccttttgtgataaaatgttttagatttgtgcacccattggcaaaacaggaaagtttccagataggtattgtatcattgagaatgcagcacagatagtgtgggcttcacactatagacacagaatatagctttttcttaaagccaaatttgggtgataggacactttaaatatccttaattttggcaaccactagcaaaaaaacttgtcagaataatttaaccaagcccctctccacttcttttatttaaaagcactgattcaattgctaggaatatttttgcagatttttctttacagtattccataggcaggtccactggaaaactgcagaaaaatgtgagctctcctggtaaatagtatacattttataagctatattttaaaggcctaagaacatggcaagtatttacttttatcttttttttaaaaacactcatgacagaaaacagtttaataatatctcattctaaaataaaacactggttgcagggtcttcaggatgcctattttgccaagaaacttcagtatacaggttagaaatatgcttttgtttttgaacaataatataytggtttgctttaaagaagggactaaatatgactttaaagagacttcaaaatattgagtattttaaaaatttaaaagtaggtcagtttataacgagtaaatacctaacacaccaagaatgtgcagtgaacctcaggcatttaagacacctcccccacygcccgccccccgccccccccaatcaaagtgtggtcccaaaacaagccaacagctgtatatctcaaaagttaacccaagacaactctgatatttaggttatttgttgagactcattggtactgactggcaagtattctgctttaaagtatcatgtattaaaatgtttagacagcatgtgttttaaagtgataaatgcaaaatgttaagtttgaaatggttaacagtaaattattatgttagtttccaggcacttgaactgtgctacaagtaggggaaaacctactttaaagtatggtaaatgtgtgttttaaacttcctatcaagtgacatacttcatttgattttttgtttaagaagccatggtacttttttcttgagttactttggatatgttttttcaatgccatctgaagattttgtaattgagtagcagtaaatatacagatttacaatgttttaactacagttcatgaatagctggttgtgtaaaactaataaaaaactagactttcacatgtactctgtactgtagtggtgatacatccatttaataagtgtgcgtactcatcaagaactttcatacagaacaactccatttcctcacttccaaatactctatgcatgactacttaccttctttatagcaaatggtcataaaattaaccttaattattcagttttgtgaagtcactccaagaaaatggtccattaccacaaaagagtattccaaattgtataggttatagggctgaatcaatttaaaaatcccttttcagaattattccccataaggaaatgctatatacacctataagatatcaaatgcaagtgacttaaaacaccagtgatttagatttatttttattgacaaggtttataagaacaaatatttaaaatcgaaggccaattattaggtctcatttagttgcttattttgttcacttgtatttacctttccctagtgtctgagtaactatcaagaaacaaacctgtgaaaatacctgttaacattcaacatatatttttatatatttctgttctatgatgcaaagatatttttcaacacttaattggtgcaacaaatgtgtcattgtgtcataaacagcatgttttaaaattcagatttaataaactgatttaagacagtaaatttgaaagacaaaattaagtctcattcaggagtggtccattatgttgatcatctagaatcaacactgattaaccaaactctgaaagccaagagccccaactccagagaaacattaaatttctttaatgtaaaagtatattatttttgagacacactttgtcagagacatccacgattgcctgcacattatattctggcattataatctggtactttagtcataatcgtgaagctggctaggtttccagtaaatatcagcattttatatgggcaaaagcagttaataaaaatcagttcatttactgtaagccaaatgtgcttgtacttaatcccaccctttcccaaagtttttgaagctttgataggttgatttttggtctgtccttatataatataaaacgtacctacagacacttttacagagttaatactaaaattacaaattgatgacactttcgaggcaaagcagggtaactgttccttcagtgttgccatcactgaattgactttcactgttccatcatactgtttggctgaacactgacattccatagtctacaactataaagatacctacctatgtgagtttaaaaagtgatctgcacaaaagaaataaaaaaactttatatacaaccaattgttttttaaaaatacaaaaataacatctgtcacttttgtcatgctgacaatttgacatatatacacatgcaggagaaaagttccaattcagtgatctggacaactgtagcttgtatatttttaatatgatggacacactgccgctgaattttcacactgacagagatgtgtattcaaaatatttcatatactaaatactacaatctctgtatgtataaatcctggtgataatagtttttgttctacttgattaaaagtatgccttaagcaagctaatattaagtgcactaaaaaccacaacagctcaagaatctatgaccttatataaagaaatccaaaatgtacaaaatacaactataaaagcaaggaacaattaatgccatgcaagattttaaactaaaaatggcatagaaatgcaatttaaaacagcaaactcaaattcacataacactcaagataaaaaggtcagcagtaagttctactaacgttgcttaacaaggatttagaaaaggaaatacattctctttgctggtataatggtataaatcagatcttcaaatctatgggaacgagtcatcttctctgtcctctatctcaagaaattagctgtaatgaaagagaaacattattttgccataaatcataaacctttatcccattttttccacatctattttactattttgtccttcaaaaatcagttgagatcaatacagaattacagctacctgctgatcttcccctcacctttgcctcgtagacaggaacttcctcaagtatttgtgagagcaacgttgagatgcccagctacccaggtacaccatgaggccacatcataatctgagttcaggtcttatcactaactgttcaaactttaattttaagctttaaagtgggaatgagaagaaataaatttccctattatgaagaaatgtgaggatcaaatgtgatatttagtgacatgaatattttgaaaaatatggagtattttatgtaattacttttgtcttatatttctaaagtcaaacttgaaagactgaaatatttacctcttttacagttgtttttatgaaatcttttctttcagttaaatcataagtaggataattttcatagacctatgtatagtgaaaaggaaaaataatgttaaaagcagattttaaaatccagtaatattgtctttgaataaaagcaggaaatctgctacgtgcaaatagccacaaccatcccaacagtactctggttaacccatatggaattctattccaaatgagtattttaataatattgtatatgatgtggaaaactagcatgcaaacattctcagtgttttcaggctgagagtctggaatgaattaactaaccataaacaagccagatgtgatggctcacgcctgtaattccaacactctgggaaacctaggtgggaagatcacttgagcccaggaattcgaaaccagcctcaggcaacctggtgagaccttgtgtctacaaaaaatttaaaaagtagccaggcatggtcatgcatgcctgtaatcccagctactgaggagggtgaagcaggaggatggcttgggcccaggaggttgaggttgcagtgagctgtgttggtggcactgcattccagcctggaccacagagtgtggggaaaagaaagagagatcagatggttactgtgtctgtgtagaaagaagtagaccacaggagactccattttgttctgtactaagaaaaattcttctgccttgagatgctgttactctctgaaacatgtgctgtgtcaactcagggtgaaatggattaagggctgtgcaagatgtgctttgttaaacagatgcttgaaggcagcatgctcgttaacagtcatcaccactccctaatctcaagtacccagggacacaaacaccgcggaaggctgcagggacctctgcctaggaaagccaggtattgtccaaggtttctccccatgtcatagtctgaaatatggcctcgtgagaagggaaagacctgaccgtcccccagcccgacacccttaaagggtctgtgctgaggagggttagtataagaggaaggaacgcctctttgcagttgagacaagaggaaggcatctgtctcctgcctgtccctgggcaatggaatgtctcggtataaaacccgattgtacgttccatctactgagataggggaaaaacgccttagggctggaggtgggacatgcgggcagtaatactgtaaggcattgagatgtttatgtgtatgcatatctaaagcacagcacttaattctttaccttgactatgatgcagagacctttgttcacatgtttatctgctgaccttgtctccactattatcctatgaccctgccacatccccctctccgagaaacacccaagaatgaccaataaatactaagggacctcagaagccggccggatcctccgtatactgaacgctggtcccctgagtccccttatttctttctctatactttgtgtctttttcttttctaagtctctcgtttcacctaacaagaaacacccacaggtgtggaggggcaacccaccccttcaacagagcaagaccctgtctcaaaaacaaaaaaccccaacaaacatgggtaaagaaaacatccagatagatcttagataacagaactaagttctttatgttggcaagtcatctgccaagtgtcttttagggaaaacttctttcttctccaacccttgttattatccagcaccctacctatgattccacaacctgaaaagcaatgaactgcttcctctactccactgctcagtccctccctaaagttaaatcctaagacccaggtggtctcaagagtcctgtactcctaaaatttgactaaatttctgccttttgtcaattttctcagtcctgttatacttgctgcttgactcaggtcctgactctataagctcacagtctgcaagcaccctgtaggctttacttccactgtatagttcagggtcagcaactttttctgtaaagggctagatggtacaaatagtttcaattttgccagtcagtttctactctgccagtcagtttctactcaactatgcgttgtagtggcaatgctgccatagacaatagttaaataaatagatgtggctgtattacaataaaattttgcttacaaaaccaggtgactaagatagaatggatttagcccacaggctgtagtatgccaaccctctaaaatatagttcatcatttaaattactctaattgtttgccccgggaggttccaagatggccgaataggaacagctccagtctacagctcccaccgtgagcgacgcagaagacgggtgatttctgcatttccaactgagataccaggttcatctcactggggcttgtcggacggtgggtacaggacagtgggtgcagccaaccgagcgtgagctgaagcagggcaaggcatcgcctcacctgggaagcgcaaggggtcagggaattccctttcctagccaaaggaagctgtgatagacggcacctggaaaattgggtcactcccaccctaatactgcacttttccaacaatcttagcaaacgggacaccaggagattatatcccgcgcctggctcggagagtcccacgcccacggagcctcgctcattgctagcacggcagtgtaagatttaactgcaaggtggcagcaaggctgggggaggggcgcccgccattgctgaggcttgagttgtaaacaaagctgcgaggaagctcgaactgggtggagcccaccacagctcaaggaggcctgactgcctctgtagactccacctctgacagactgcctcaagtgagtccctgtcccctgagtggcctaactgggagacacctcccagtaggagctgactgacacctcacacggccgggtgccactctgagacgaagcttccagaggaaggatcaggcaggacagtatttgctgttctgcagcctccactgctgatacccaggcaaacagggtctgcagtggacctccagcaaactccaacagacctgcagctgagggtcctgactgttagaaggaaaactaacaaaaagaacatccacaccaaaaccccatctgtacgtcaccatcatcaaagaccaaaggtagataaaaccacaaagatgggaagaaaccagagcagaaaagctgaaaattctaaaaattagagcgcctcttctcctccaaaggaacacagctcctcgccagcaatggaacaaagctggacggagaatgactttgatgagttgagagaaggcttcagacgatcaaacttctccaagctaaaggaggatgttcgaacccatcacaaagaagctaaaaaccttgaaaaaagatgagacgaatggctaactagaataaccagtgtagagaagtccttaaatgacctgatggcgctgaaaaccatggcacgagaactacgtgatgcatgcacaagcttcagtagccgattcgatcaactggaagaaagggtatcagtgattgaagagcaaatgaatg

SEQ ID NO: 97429 - DNA, 21872 bp, Homo sapiens
atttatttatttatttatttatttgagacggagtcttgctctgtcatgctggagcgcaatggcacaatctcggctcactgcaacctctgcctcccaggtttgagcaattctcctgcctcagcctcccgagtagctgggactacaggtgcgtgcaaccacgcctggctaatttttgtatttttagcagagacggggtttcaccacgttggccaggctggtcttaaacttctgacctcaggtgatcgcctgccttggcctcccaaagtgctgggattacaggcgtgagccaccgtgcccagcctatatttacttttaaatggtcctgaccaactaaatgcatttcataatctattgaaaaatactgactaatgaacacatatatacttgaatattattttatgtctttccttgggtttctctctggtttaaataacatcaacacccttactctttcctaagaactgtttttaaacctttcaataatttagcatggtctttttccagcttcttgcattgtctccaaactaagactctaagaaagtcttggtcgttgccaagagcatgtggattacttcccagtaccaagacttccagctccagctcgatccagctcttgccctccatcagtcagatgggctttccaaatgacacaactccacatccacctgcccttgggaatcttctatctgtttggcccccaagtaattcactctaggattagaaaggatggccaggtgaggtggctcatgcctgtaatcccagcactttgggaggccgaggcaggcagatcacccgaggtcaggagttgaagaccagtctgcccaccaatatgatgaaaccccgtctctactaaaaatacaaacattagccgggtgtggtgcacatctgtaatcccagctacttgggtggctgaagcatgagaattgcttgaaaccaggaggcagaggttgcagtcagtcgagaccatgccactgcactccagcctgggtgacagagcgagactctgtctcaaaaaaaaaaaaaaaagaaaagaaaagaaaagaaaagaaaagaaaaaaaaaggaatcagtcccttctcataaagcatttacattcgagttgtagtttcagggtccttgtttgtttcccatctgtctgtctgtctgtctctctctctcgaccaacctgtgtagagtgttttgcgaaaaacacacatgtacaagttactagattgactcttttttttttttttctgaggcagagtctcactctatcacccgggctggagtgcagtggccatgatctcagctcactgcaacctccgcctcccgggttgaagcgattctcctgccccagccttccaagtagttggaattacaggcgcgtgccaccaatcacggcaaatttttgtattttttagtagagacgaggttttgccatgttggccaggctggtctcgaactcctggccttccaaagtgctgggattacaggagcgagccaccgcgcccggcctattagattggctctttatccctgctgaacatctctagttcttcttcgactcactttgaatcctggaagcaccactacattaaatgtctcttcatactaataagaattttcgtccaaatcgcgcaatcacctccagggccaggaaaggggacccccggtcgggagtgcggactgggcgtggtcactgaccccgagcgtcccctccttctggctgacacgcggctgcagacgcaggagcctcctgctggcgactggagtgtcactataaataattgaggccaacacccgcggagtgacattccaccccggtaggcctggcctacagctcccagcaagcctcgcgcaagctcgtggactccatctcccggcgggccggcactgccctgccgggcggtcaatggcccgctctgagtaggtttttccgtttttacctgacagctgagaatgtctggaagcggaggggcggtagcagcctgcctgggaatgggccaccccgaatcccgacccgaaataaatgcaccagcatgctgacgcggtaaaacaggagccgccggcaatagcagtttcaccctcatcccactgagggctctatgttggctcccgcccccatcccgacaaccccctcgcgccttggcggtgattggtgaaaagacacatcaatctcacttcaagctgtgattggaggatatgttgtcagccccctccttttggaactgtgattggagggaatcgcctatccgcccgccccctgctctgggcggagccgagcaggaagtgggcctggcttttgccaggtgctcctgtgggctccgggtgacgtccaaagggtgtggcccgactggccctccaagctatggagtatccatagtaacgcgtcagccgccgacctcgggccattttcccaaggctccaggatctctagatgtcccgtcgtctcaagggcgtgtagaacgcgggttttgggggaggaatgaacaaaaatcgactgggagttttttcaaaacacgtacatatgccctgccacccaccccgctctcctaggtgcgtcagaactgctgggacatctgtcacgtgaaggggtgggttgcccctccacacctgtgggcgtttctcattaggtggaaggagagacttggaaaagaaagagacagagagacaaagtatagagaaagaaaaatgggcccaggagaccggagttcagtttacggaagatccacgccggcaccagcctctgagttcccttagtatttattgatcattatcgggtatggcaggataataggataatagtggagagaaggtcagaaggtaaacacgtgaacaaacgtctctgcatcgtaaacaaggtaaaaaaaaaaatgctgtgcttttgatgtgcatacacataaacatcacaatgccttaagaagcagtattgctgccagcctgtcccacctccagccctaaggcggttttcccctatctcagtagagataggctttacaccgagacattccattgcccagggacgagcaggagacagaagcctttcttttatctcaactgcaaagaggcattccttcctcttttactaatcctcctcagtacagaccctttatgggtgtcgggctggaaaccttggacaatacctagctttcctaggcagaggtccctgcagccttccgcagtgttttgtgtctgggtacttgagattagggagtggtttgagattagggagtggtttgagattagggagtggtgatgactcttaagaagcatgctgccttcaagaatttgtttaacaaagcacaccgtgcacagcccttaatccatttaaccctgagttgacacagcacatgtttcagggagcacagggttgggggtagggttacagatcaacagcatctcaaggcagaagaatttttcttagtacagaacaaaatggagtctcctatgtctacttctttctacacagacacaggaacaatctgatctctctttcttttccccacagtcacgtgtacttggggaagaactcccccggtgattctgacactcttgccctacgcctcagccattgagaactattggtatggagggcctgtaatttatcaaggcgcggcctcagatctgtctgcctcgcagataccttcctcacccgggtcagaatgacttgcctcaggctcctgccaaagagtttgcaccactcgtttcttccctgtaattacttgtttgcgtatttgtctccccactgggctgcagcttcttgggtagtggctctgttttattcatctgtcctcttcccttccaaatgcttggcaaggaaaagtgccctttaaaataaatcgacttgaattgggagtggtggtagggaggctgtcaatgagaatgaattcagggtgaaactaggtaggacaatgtcccaggattagtttggggttgagctggggagctcttggtgtatgggggggtcctattgtgactatggtggaatagccacgatactgagtgacattgggcgagtgaggtgggggagagactagacaacaccccacataacccatcttgacagatgtctcagaaagattatgggaatttcctggcccctctgcaatgtgggattccattttgctacctctagaaggacagggtcttgttttcatagctctgcctcctactctgagataaaggcatgcaagacctgagctactactacaataccccacacagaaggagaaaatcaggcacatctggattcaagttttgtgggtgattccatgattgcctccagtgaacaatctgggaagcacagtgtccatatcgccatttcaggggtactggccccaacatcagcccttaggcctaagccctagagaccttgacacctggtggctgagtcagtatctcagtaatgggctttagaaggaaacctggtgattcagggcctcaagaatggcgttgggcaagccaccagaccagctgcctgggtctcctcctccttgttgaggtgacaacaaggaactcagttcagctcctccctgggtatccaaattatccttccaagtcccagactcacagctgtcctcccttctgattcagccctgatgcttttcagggggtcccagaagtgggatccggacttgagagaatgtcacagttgaaaatgataaggatgcaaacggaatggaactttcagagaaccccaattttctactctaagttctccaaaccaactctcaaatccaagatagctgcctttcctttcttcacctcctcttcttagttttccccaacttggctgcaaagtcagcctcccctcttctcttccttagcacctcagaccaataaaacatgcaaccttttcttattctttttaaaaaatttatttttgaccaggcgcagtggctcacgcctgtaatgccagcactttgggaggccaaggcgggtggatcacgaggtcaggagttcaagaccagcctggccaacatggtgaaaccccatctctactaaaaatacaaaaaattagctgggtgtggtggcacacacctgtagtctcagctactcaggaggctgaagcagaagaatcacttgaacttgggaggcggaggttgcagtgagccgagattgtgccactatactccagtctgggtgacagagtgagactgcctcaaaaagaaaaaaaattattttgtttgttttttagattttgtagagatggtgtttccctaagttgctcaggctggtctcgaactcctggcctcaagtgatcctctcgcccgggcctcccaaagtcctgggattacgggtgtaagccaacatgcctggcccctttacttcttcttttctgttttggtcacaaaacatttctctgttgatcactgtagtgtgtgtgtggagggaagtgggggaggtacactcttaagaaatgaaatagttaacatcttggccctaagatttgttgtagagatggagtcttctcattctgttccccaggctggtcttgaactcctggcctcaagcaatcctctttcctcggcttcccaaagtgctgagattgattacaagtgtgaggtactgcgccctgctacaatcctttaataggatgtttttggggggggtggcagggggcaggatctagctcactgtaacctatactgttccagtgtaacctgcaccaagccatcctcccacctcagtctcttgagtagctaggaacacaagcacacatcaccacacctggctctaacacgattttgctttttgcttttgtcattttggctgctgttctttttatctttcattcattcaaggtctgaagatggagataataggaatcttctcatctcaatgtgctctttggcccctcctcttaaactgatgcccctctcaggccctgagggatttggcctcaggttgccctggaaggggtgtgagtgatcagacaggtgactgagagctgggacgcctgaggcctgcctaggctgagtcacctagtaatgttgttgtcattgttcctgttgaagtcccagctcagtgtcacagacctttgtggaagcaacaacagctcccatccttccaacctttctggagaagccgtggcctgatggtgagccgaatgggctgggrggggagaagaaggcggctggggcggtggggagatctggggcccggatcggtgcccctcctccccatgccactgccacctcctcctcctccttcatgccggggacctgggggagggaggatctccatcttctctctgtcccctgcccctcatacaagaagctccccctcctcattttcccctcccaccgcagggcccccttgctcagtgctacaggggacaggggcttctcagtcttgccacagtgctctccctatcccagccacccccccaacacaggctcaacctgcaatgacacctgcctctgcatctccctcctggggatcccactccaccccacccctggccccggcaacccccactccctcacagcagtgcccccaggactctcctgggctgcgggtaggccctttgatccctgaacaggattatgagcggctggaggactgtgaccctgaggggtcccaagactcacccatccacggggaggagcagcaacccctgcttcatgtccctgaagggctccgaggtatgtgtgtgggtgtgggtgggagagggttagtggtgcctgggagctccagtacttaccccaggctgggcctctggcagcgggttgagaacgtggagaattgatcacatgccaggggctgacactctcccctctgtgcccaggctcctggcatcacatccagaacctggacagtttcttcaccaagatatcctttgcgctaggcctgcagaggtggcatgggaaggtcctcttggagctggcactgttcttggcagggagactccgtgagggcgtcatgggtgggagacttgttggggctgaggggaggtgtcctcaggagaggccccccgtgcctcaggcttgttccttgacacgcagccacatctacagctaccaccagcggaatggctttgcctgcatcttgctggaggatgtcttccagctggggtgagacgcttagcccgggcccggaactcrgtcccctgggcccatggcttccttctgtcattttgcttccttaattgtgccagctgcttccatcccatgctttccygagcagcccaagggctcagcaggggcagggtcagggaggataaccatgggctgctctgggggctggggcaggagcccacctggctgtccctgatcactgcagcatcccggyacccccmcttcctcccggcagacaatttattttcattgtcaccttcacaaccttcctccttcgatgcgtggattacaatgttctctttgccaaccaaccaagtaaccataccagacctgggccgttccacagcaaagtgaccctgtcagatgccatcctaccctcagcccagtgtgctgagaggttagtgacaacctggtggggccctgggggtgaagcatgggcagtgggtagaggagtagaygggagccccactttgtcccgtcatctagatcagcagttctcaaagcttttggtcttaggaccaaaaatacacttaatatactttaagttgtacttaagtgtattaagttgtacttaaagtgtattaagtatatcttttttttttttaagacagagtttcactcttgttgctcaggctggagtgcaatggtgaggtcttggctcactgcaacctccacctcccaggttcaagcaattctcctgcctcagcctccccagtagctgggattataggcgtgcaccaccacgtgtatttttagtagagacagggtttcaccatgttggccaggctggtctggaactcctggcctcaggtgatccacccactttggcctcccaaagtgctgggattacaggtgtgagccactgtgcccggccttttaagtgtatcttaattacagtgcattaagtgtatcttaatacacttaaaattggttgagaatcctgaaaagcttttgtttatgggagtcgtatctatccacattttaccttataaaaaattaaaattaggccgggcatagtggttcacacctgtaatcccagcactttgggaggctgaggcaggaggattgcttgaagccagaagtttgagatcagcctgagcaacaaagtgagaccacatctctataaaaaataaaaattagctgggcttggtggtgcgtacctgcagtcctagctaagcctagtcaggaggctaagacagtgactgtctctgatcactgcagcatccctacaccctcctccctcccagcagacgattcattttcattgttgccttcacaaccttcctccctgaagcatggattgcaatgttctctttgccaaccaaccaaataactgttccagacctgggccgttatttggcagggagataggagctatgtttctactgctgcactacagcctgggtaacagagagagaccttgtttcaataaaaaggaaaaaaaaaaaagaaggaaattgtagctgagaacaactttaaaatgtaagagtgcggctgggcgtrgtggctcacacctgtaatctcagcactttgggaggccgaggcgggcggatcacaaggtcaggagatcaaaaccattctggccaacatggtgaaaccctgtctctactaaaatatacaaaaattagccaggtgtggtggcgggcgcctgtagtcccagctaccctggaggctgagacaggagaatcatttgaacccgggaggtggaggttgcagtgagccaagattgcgccactgcactccagcctgggcgacacagcaagactccatctcaaaaaaaaaaaaaaagagtgtacaagcacacatttcatcagctgtcagtgtgatgtgacatgttcaygtgtcttgtagcctctggaaaactccactgtactctcagagtacaagaatgaaaacatcagaaagcattagtattatttggaaaaagtttgactttgcacatttgtgaaggccacttcagcacccaccccctgccccgggctctaccttgagagctgctggtctasctagatccccctcctcatgatggtttttcctcactcccgaagtctggtctgcctctttctcaggcgcccacctttctcccccactgcccgcccaaccccatacaggatccgctccagcccgctgctggtcctcctcctggtcctggctgccggcttctggctggtccaactgcttcgctcagtctgcaacctcttcagctactgggacatccaggtgttttacagggaggccctgcacatccccccggtgagctgggtggctgtgtctgtgcagagggtgccgtgagagggtgggcagaggagaggggaagaagtgggactgtacaggtggaagggccaactggaaagagggcagaaagagcgaggtcttattgacacctgccctaggcccagaataatgtcaggagggggctaccaccacctagagagcatggcccttaccctaagggagtttagtttatttagatggctcatataagatgacatatagttacatgtttgtgctaaaaacattgattagagaaaagagaaagggcagttatctggcttttcagagctggaggaatttgggttgggcttcggaagggcaggacaggaggggaggggagcacattctaagccccagtgcaggaaggtggggaaaagccatgagcttttggaagctgcagtgaggagatggacccatcagcctaaaacagagccttcaaagccatcccccgcattgcaggaagccactgcattggcctgtcactgtccactgcttatgctctgccctttgtttcctcaccatcttgagtctgctcctccctcctctgtatctaagttctttctttgaggcacagcttgaaagtagccttctgcagcttgcttcccttgctcccctgggaggtccggagccctctgcacagcctttatgtgcagcaaggggagaggtcttagaaggcccctgagcagaggagagggaggaggccrgggaagcagaggtggtgagagcggaagctggacctcggattggctctggcgggagactgctcacccgtctcgttctcctcctcccttctttcccctcctcccctgttccttccaggggaagggaagggaagacactgggatgtactggagaggccagcctgggggacttgactaacctggactgggaaagctgagtgaaactgggctgaagtgaggtttgcagccttcaaatgagatctgacagtgccccactgccagatgtggacatagcccaggtcctgggaaggcttctggtgacagagccgaagatggcctggagtcgggtggggctgggagtgtaaagcatgcccaggcagaaggtggggaggattctgttccagagttggtgggtgcactggaaatgggaaggagagattctcccacgaactgccagacattctggttttttgtttttttgtttgttttgtttcttttgagacagggtctgggtctttcacccaggctggagtgcagtgctgtgatattggctcactgcagcctctgctccccagtagctgcaaccacaggtgcacaccaccacgccctgctattttttgtatttttagtagagacagtgtctcaccatgttgcccaggctggtctcgagctcctaagctcagacgatctgcctgcctcagcctcccaaagtgctgggattacaggtgtgagccaccgcccctggccagccagtctgttttgtgtgtacaactgagggggcctcaggcccttaaggagctgagaagccaggtccagcacctggaggcgtccccaggaagtgcatgactactggccacatgaatggcagggatgatgaacagggcagtttagaagaggatgaaggaagtagggcgcgcccttgttagtgacagggttaagggagggcagaaagagaaaggtgggagagggggacgatgtagcttggtcatggcgagtttgtgatcgcaaactcagtttgcgggttttcaggccgcacacttaggggtgtggagcttgagcatcactgtggagaggaatggggggtcgctggctctcatcagtgcccctttcaggaggagctgagctcggttccctgggcagaggtgcagtcccgcctcttggcactgcagcggagcgggggcctgtgcgtgcagccgcggcccctgacggagctggacatccaccaccgcatcctgcgctacaccaactaccaggtggcgctggccaacaaaggcctgctgccggcccgctgcccgctgccctggggaggcagtgcggctttcctcagccgcggcctggcgctcaatgtcgacctgctgctcttccgcggtcccttctcgctcttccgcgggggctgggagctgccgcacgcctacaagcgcagcgaccagcggggcgccctagcagcgcgctgggggcgcacagtgctgctgctggccgccctgaacctggcgctgagcccgctggtgctggcctggcaggttctgcacgtcttctatagccacgtggagctgctgcggcgcgagcctggcgcgctgggggcgcgcggctggtcccgcctggcgcgcttgcagctgcgccacttcaacgagctgccgcacgagctgcgcgcgcgcctggcccgcgcctaccgccccgccgccgccttcctgcgcaccgctgcgccccccgcgcccctgcgcacgctgctggcccgccagctcgttttcttcgcgggygcactcttcgccgcgctgcttgtgctcaccgtctacgacgaggacgtgctagccgtggagcacgtgctcaccgccatgaccgcgctcggggtcaccgccaccgtcgccaggtgcgacggcagatgcccggggtggtggtgtgtgttggtttctctgatctggggccatgtgaggttccccccgaatccttacctctcccaccactggggccctctagccctacatcccaccgcgcgtcctcctaatcgcaggccccttccccccacggatcccgcctttcaggtctttcattccggaagagcagtgccagggtcgtgcgccgcagctcctgctgcagacagccctggcccacatgcactacctcccggaggagcccggccccggcggcagggaccgcgcctaccggcagatggcgcagctgctgcagtaccgagcggtgagggtgggcgcgacggcgggctgaggaggaagttgtggggtctgtctgcgcggagggtctgtctgcgcggagggtctgtctgggagagggcatgagacaaacggactataccaggagtctagggagtgactgggtggggaggcttcttgccctggcgagggtcgctggggactgcttggtcctgataacgcgcgtgggcccctcagcgacccctgctcagcctcaccgctgcttccccaggtctccctcctggaggagctcctgtccccgctcctcaccccgctgtttctgcttttctggttccgccctcgtgccctggagattatcgacttttttcatcacttcactgtggatgtggctggggttggggacatctgttcctttgcccttatggatgtgaagcgccacggacaccctcaggtcagagccgttccctggccctgggggtttgggctgggtgggagttcgcttgcctctcrggagcagacctgagttccagccctggctccaytgcttgctacctgtgccgttgagcgggtcacttcccttcctgtgctctcgtgccytcgtctgtcagatggcaacaatggcaatgtgctctccagagcacagccaaggccaggcttgtgaasacacagattatgtctgtatagcctatratggagttgctggcacatagtaacgtcagtaaatgggagcaaagaccacctgggggtgaggaatgggcttggccrgtgggtggggctgagtaaggactggtgcctggaccaaggctgtcaggatcaccctgggcaaagcactgaggctcagccctatccccgagctggcaatcagtccaggggtgacgaatagatgacaggcccaggttctgcactgctgctgtatttttgggtgatggtgaacaagtccccattgtggtctgtttccttcacgtggaagatggggcagtgtttcctgtcccacctgttcccataaggctcagtgttcttagcacctgaaagactgtccttgctcacagtggctctcggcgggacagactgaggcctcgctgtctcagcgtgcggaggacggcaagactgagctttctttgatgcggttctccctggcgcatccactctggcgccccccagggcacagctctaagtttcttgggcacctctggggccgagtacaacaagatgcagctgcctggggtgccacctcggctcgcrgcccctccaccccgggggtgctcagcaactgcacctcgcccctggtgagtcccaagcctggcctccccttctgccttcacccccacaactcctctccaaacccttcccctctaggctcaccttaggtagtaacctgcctcaccagcccccgcccccagcctgctctcctgccttctttaggcctctgcttcctccctactccrtttctgtcctctcttctgactccctctttggctttccctctcctcttgcacccagcctgaggccttcctggccaacctcttcgtgcaccctctcctgcctccgagagatctgagcccgacagccccctgtccagctgyggccacagccagcctccttgcctccatttcccgaattgcccaggaccccaggtgaggagtggaggctgagatgcaggggcatgtggaggggggtgggctgatcctgtaggagtggggagctggggcgctgaggggggattcagaaggggagtcctctggggtgtggcgggaggagggcatgacttttgacstgcttcatgttatgttccagctctgtgtccccaggaggcactgggggccagaagctggcccagctcccagaacttgcttctgccgagatgagtctccatgtcatctacctgcaccaggtgagtagaggggtgcccaaaggagaaatgtggagagaaggcaggtgaacaacatggagactgaggtggggtggagtctacggaagggtctagcagagtggcaggaggaggctgaaaagccctctgcctctagcccaggtgcttggccctgccctccttggggtgcagccctcattcctcctcctttccatgcagcttcaccagcagcagcagcagcaggagccgtggggtgaggctgcagcctccatsctgtccaggccctgctccagcccctcacagccaccctcrcctgatgaggagaagccatcctggtcaagtgacggtgaggagggtggggcctgcaggggacagagcctggtggacactgggcatcatggaactgcccagctgatggcctttttcaccaggctccagtcctgcctctagccccagacaacagtggggaacccagaaggcccggaatctgttccccggagggtttcaggtgaccacagacacccagaaggagcctgaccgggcctcttgcackgactgagaygactcctcagggtcagyattgcctcctgtgaggggagggagaaaggacggcataggtagttggtttggagtccgacttgaagcgatgggagcagtggtgggaatttggggtgatgggaggtggtcatctctggaatctagacccctggactgcttgccaagagccgtctcctcccacaggtaccctggcttcggcagccacaggagattggagggtggagtagaaaaacacaaggagtcattgttagaggccccatagatgacaggcccaggtgctttagttgggcaggacctgggagtcagtgaggaactcgccccgagaacagagaaaaggtaggcaaggagaggagatgctgatggcatctggaaacaagtcttagagatggtctgcacccagagggaataaggggagacatccccaactggaatgtgtcctggagcagctgcctgggaagaagtcctcgagtttcctcaaggtgggggacagaggtcaaggatgaggccgagctaaatggaagggcgacagtgaggcaggtgggctttaaggctgtggattcgtcatgctggcggctgccagcagcactttcaggttccttggggcttgtaggggatggggacttgtcagtggaaagacgggagggatgatgtttttggacttcagtacgggtgtgatgtcccaggaagtgggtgtggctccccatcctgtatgaaataagcagtaaagcttgctcatggctgttgcacatctctgtgactcttgtttctggcaggccccactcctggcagctgagtgctgcacctgccttctcgatyacgagcctgagaactgcacgggggagcagcccagactggctggaaaccatgttttcagagtgcagggtcaagtggcgtgtaggactctgtyaaaagaatgacccctttccccaccacatacccacaactgcacaggttaaaacagaaatcttgtcattttataattgtaatccacgccgggtgcagtagctcacacctgtaatcccagcactttgggaggctgaggcggttggatcacgaggtcaggagttcaagaccagcctggccaagatggtgaaaccccgtctttactaaaaatacaaaacctagccgggcgcggtggcaggcacctgtaatcccaactacttgggaggctgaggcaggagaatcacttgaacttgtggggtggaggttgcagtgagctgagatcacgccactgcactccagcccgggcggcagagggagactccgtttcaaaaaaaaaaaaacaaaaaaaaaaaactgtaatccacatgagctggggtaggcactttagtagttctcctaacatctggcacagtcccttatggtaaatcttcaataataaatacttgatttagagattagactttacaggtaagatactcctgagagaggcaagaggaatctaacattcgactaagaaacaggaagcgggtggcagtaggccctggggtaccgctgctgggaggggccttccagattaaggcggacccaggcccgaggcaacaggcctagagagggaaaagaggcgttttgctccttcctggaggaataatgctgaatccttgcagcctctggacagatgtgagaaggcaccacctcaagaggggaggagcggggctgatcctggtcgggcggacctgagtcgggcagccgctctcccggaactggaagggaaagccaggcggctctcaggggctgttggtgtctgagccgggagggtcgaacgcccagggcactgcgccccgcaactgacgctcctgcaaggaaaagctctgggtgcgtatgcggcttgtcacctcctgggtgcgcagcgtgagcccgaaaatgtcttcgtggtagcgttgctgatcctgtcggaaaagagcacagtggatcagaacccgactcggagaccttagcaggaaccccgcacgctcaggcccggcccgcccctccgcacccgcagcacgccgatgacgtcgccggcctcgtccagctccatgtcgccctccgtcgccaggatgcgctgcacggtctgcaggacgttggttgccatggtaacatcgccgcagacaaacatgtggccccgctcgaggcacagcacgcggtgcacctccgcagccagctccgtcctcaggatgtcctgcacgtaggtctgcggggcggcggggttagggcgggccctggtgggggtgggcgcgggggcgcagcccggggctgctggctggccctggacgtgaaagtctccggagcgggcctggtggggcctgcgtgccctggggcggtgtcaacaggggcagagccaaaggggcggggcaggggcgggaggaggcgggcctagaggggccggggcacaagggtgggccagagtgtgcaggggtggctgagtggtcgtgggaggccacgggagggccgtggttggtgtgccccgctggagagcgcgagtcctcccctctctccctatcttcaggttaccattgcgccctcagggtctcacaccttggggttgtcaggttcccgggagaaggcggtgaggactcggccaaacaccccgcgctgctgggcgttctgcacctcgtcgcggtagagatggtcaagttgggagcatcggcagccgaacaccaaagtcatgggagtgggctgcagccctgcaagcaaccccgcgcttgggaaggctcttctccggggcacagtgctagtggggcctccccacaggccaccgtcgcccagcctggcagcccagcgttttgggctgaaaccaccattactttggctgtttcatctctaagagagtgtagaatgctttcacagagaccctgcacagccctgatttacagagggaagggaagcgcgggtgaggtggtggcccctggtggagctgcgctagaatgcgcggcttcggactcagaattccatgccctttgcattgtgtgacatcgcagtccccttccccgctcccacttcatattctcccatacttataactctcctcccagtcacagccctcttcttttgattgacagaccaccctgggcaccccatgctcaatatgaacaccttgtagcatccttaggtcttggacagacctcggtcagctctggcacagtcaagaatccaccttgggcagttcttctttgagtcttagccctaatccctttgaaaattctattttcctttgtcctcaatccagtcaacacctactatgtaccaggcaccaggaagccagaagctcagggcccagcccttgcctttggtacctgccctccccttggtctcatgagcgtcttttcagctttgtggactttgtttcctgccctctctttcctatttcctgccttccagccccacccctctgtccctagattgtgtgactcccttcaggcagtcctttagtccccagcctcacctttgctctcaatgtcatgcagccgctcctgccagaatccccggaagggggcaatgccagtgcctggacccaccaggatgcagggcaagctgggatcgggtggcagccggaaggagggagccctggcaggagagacactccatcaggtcccctttgcctttcctgctccaccattctcaccatgcagggtgggtggagcaaggaggacccaagttcttcccatctcaaaaaaaaattaaaaaaaaaacaaaaaacaaaaaacaactctacttgctgaaactccttggatctgtggtttctggagattgcaccaaaggaaatatagttcattttggattgaagaatacttagatgactcaggggatttagaaaacgtgggaagggtgaaagacactttcagttcataatgggttcactaagtgtgtttattttaagtatccttaatagtggtatttagtttatgttcagtagatgggtacggtttatttgtagtttagccacctgggtggatttgaatcaccaggcccagctgatggcagcctaggaactgttctcagtcctaccaggacttttggttcctggctgcgagagcgggcaagacttctggacacagcatgaaggaagggtctcttaaaatccttcaccctcggtccgggcgcggtggctcacacctgtaatcccaagactttgggaggcggaggtgggaggattgtgaggtcaggagctcgagaccagcctggccaacatagtgaaacaccgtctctactaaaaatacaaaaattagctgggcgtggtggtgggtgcctgtaatcccagctactcaggaggctgagacaggagaatattttttttttttttttgagacagagtctggctctgtcgcccaggctggagtgcagtggcacaatcttggctcactgcaagctccacctcccaggttcacgccataggagaatctcttgaacccgggaggcggaggttgcagtaagccgagatcgtaccactgcactccagcctgggcgacagagcaagactccatctctgggggaaaaaaaaaccaaaaccttcaccttctttgagtccttggtgacaccaaggccaaagggtggtcttaaccctaactagtagttctccctggattgagtgaggatttagtgactgtagttcccaggtgccatgctgcccaacatcagacagcccagggacatagagaggaacacagaagctttcagaaagccacagggccagccggtttgataccagctctggctctgggagctatagtttcagggcagaactctgagtctaaatgaatgagagagccaaagcttagccagagttctgaagtgacctaatgacaccacacccttgacatgttacagagctccttcctgtttccagtgacacccctcaccagtgacactcctcaccaaagctgccaccctgaccctgggcagctccccaccaagtcctccatctcacttacccccggatgaagcagggcacagggtctccgggcttgagctggcttagccacgtggagcagactccatagtgcagggggcccagcccatctgggggtgggaaggagaggccggtgaggggccagagaggggccggtcccaaccctgctgtggccaggcctgctcctgcttgttgcctcaccctgagtcctgtatgccagcacagctacagtgaggtggatctctcctgggtgggtgctgggtgccgagctgactgagtagtaccggggctggagcagaggcagctgggtgaggagcagtggggcaggcagcgccaccgacgggaactgctccagcacctccagcagcgtggggcagcggaaccacttccactcctcgtagcgtcggggatcctggcggggcaggatgcagtgggttggaggccccatagcccttcctagtaacctcccttcttgacccctcccccactgagcctctttagggtttctccctgctcagttcaggccaatagagttttctctaagacctggagaatccagccatgaattcctccctgaggagctgggtcttaaagcaccagtgcatgtcagccaggagaagaaagtccaggggggactttgcatgggggtttcctgccactggggtccccccagctcatcccgtctctctagcccctgtgcctcattggggtggcccccaacctggctgagggcctccagctcctgctgttccctgggctcttctgccaaggtgctgagcagccgcaagagctgagggctgggtggggaggtgatgtccaggaagaaggtgagagcctggcgcagcgtgcacgggggcagccgggggtcccgcacccagccggggggagggccacctggggatagtgcacagggagctctgaggacagggcccagcaggactgcagtacctgggctgatgtttgtgttttggtgactgttagagagcctgcccttgagcagcggggtcggcctgtctaggtagcctcagtgtattgttcgggggcccctggccggactgggttggtctgggctcctctgcctctgactccacccccttattttaaataaagcccaggcattgatgtggcagcaaatagccccagtgccagctccagagcaagctagattgctaggggagccttggagaggagcccagagggaggggacagccttttggtgggggtgcatttgagggtgtggggatggtccagcaacaaggccagcccggcagtgggcagcacagccagctctgagcctgcctgctgagctgtggaggaggtggccaccccctgggtcgggtcctgagctcctggaggcctggggccgggggtggggctgggcatggggctggtgtgccctgttgcttcccaggctgcccctcaccagggctgcccttctccagctgctctactgccacgggctcagtgggcgccggcgggtcctccacgcggctcagcagcgcctccacaaggccgggccggttgggcgggcagacacctatgtggtcccccggctggtactgcagcccctcctggcctccggtgtccaggcgcaccaggatggtggccctcctgggggtggggagaggggcacttatggggagtcagagaggggtgggggcgggagaatgtgggaggaggagggtccagggtcagggtgttcaggacaggggttggggggcggtaaagccgtcgtcctcacgtggacttgctgctttgcaggttttccactgagcggattgtagcctggaacatcttccgcctgtgcacgtggatcagacctgggggcggggaggggcaaatgaggcagcctgagctagggagcagggcctggccccagagtgctttagtcccggggtgtgggggcctcagagaaccagccgggttagggtgagggcagggcccacctggcagcaactgcaggccctcggcctgggcgctcagccggtacctctggcgcttccagctccgtttggggctgaagatgtctcgggcggcggccttggcatcctctcccacacagaaggtctcacaggcggcctgcgggacaggccggtgagggctgaggacctcccgccaccaggggtcgccctagtgaggcgcctgggcggcttcactgcgtcttgctcctggggggttggcagccccagtggctgaggccggcgccaaggacagcaccttttccgccagcccatttcatggattggccgctgggcccagggacccggctggctctttctctgcacgtcctgattggtgcatcgttccttatctggtgcgtgttaatcccgtgatccgagaagcatagtgcttggcacacggtagctctgtgaaggcgtctgtg

SEQ ID NO: 97430 - DNA, 20828 bp, Homo sapiens
aagtggaaaaacaaaaaaaggaaataagttatgaaaataaaaaccatgtcttgagctgggtgcgctggtgtgtgcctatatccctagattctcaagagttgagacaggaggatcacttgagcccaggagttcaagtccaacttgggcaacatgacaagacccttgtctctttaaaaaagcaactcaaaccatgtcttgaaaagctatttaatggtcagacacgatggctcacgcctgtaatcccagcactttgggaggccgaggcaggcggatcacttgaggtcaggagttcaagaccagcctggccaacatggcaaaacccagtctctactgaatgaaaatacaaaaattagctggcctagcagttggtggtggcaggtgcctgtagtcccagctacttgggaggctgaggcaggagaatcgcttgaatttgggaggcggaggttacagtgaacccacatggcgccactgcactccagcttgggtgatagagtgagactctatctcaaaaaaaaaaaaaaagaaaagctatttaaggaaccaaaacatagtttgactgactgcaagaagtatcacagggaatgttagagtgttttattaatttctttgtcagacaagtgtttaggaaactctcactccaggcctaatgctgtgctaggctctgcaaatgctaagagggggaagttactgtccctgcttccaaggagatcatggtctagtgggaaacccgacacgttcaggtaccttcagatgggcactcagaagagtaagcccttagttaatgtttaaagatgtttaaagatgtctgagactcataggtcaaagtcagatttcagttccaccttattagacctgcactgctaaggagctgctttaggtaaggctgtgttcctagtcaccagggtgttcaaacacagtgctgggggcaatgtgggaatagccttcttttatttaggaagtaatgtgaagtcagtttcatgaatagatcttactttaagcattcattgaggtttttggcaagaatagagtacggtatatgaaggtgtttcctaatctccctgacaccaggaataatctagggctcattagagatgtcaaagatctgttctagtttcttaacctaaaacaagagtgttttagttccattttataggcggggagtctgagccaaacatgttatgtcactttccaagtctccatagcacagaagtcttctgtctccccatcctgactttcccagctcatagggactgtcaaaggcagcagctctggccggctgtgatgcctcatgcctgtaatcccagtaatttgggaggctgaggcaggaggatcatttgaacccaggggttcaaaaccagcctgagcaacatagtgggaccctgtctctacaaaaaataaattaaaaaaaaaaaatagccaggcatggggtatgtgcctatggtctcaggaactcaggaagctgaagtgggaggatcacttgagcctgggagttagaggctacagtgagctgtgattgcaccactgcactggataatagtgagactctgtcccctaccaaaaaaaagcaaaactatatacagatataaagtagcagctctgttgctgatagaaggaacagtaatgaggagccctgcaggtcttattccactctttctagctgcaagctttcttcctggtggcagatgacatcatggattcatcccttacccgccggggacagatctgctggtatcagaaggtaatgtgggcaggaaaatagcagtgggtatggggacaggccacagggaggtggttatatatggcctggttgaggtgttggggtgatggctcttagtatgaaccgagactagagattgattgcttgtttttctgtctgtcatgacagccgggcgtgggtttggatgccatcaatgatgctaacctcctggaagcatgtatctaccgcctgctgaagctctattgccgggagcagccctattacctgaacctgatcgagctcttcctgcaggtgtattgcagacagggcccgatgcccagagggtgcccatggtagccttggcctctataggacatgctcatctagctggtttcagggtacaggattgcagcgtgcctggaagggaaagaaagcgaggaagggtgttgggaagtggggttgtggtagtggcaagaaagggcttctctgtcctgtgtaattggaagaaagggtgataaaggactgtgtgtatgaatatgggccttaagttttggggctttctccccttctgttgcctttctgattctgcccagttgtcagctggtatgggatgttgggcttgggataccagggtttcgcatatctggagaaagcctggctcatggaccgtctttgtcttgcttagagttcctatcagactgagattgggcagaccctggacctcctcacagccccccagggcaatgtggatcttgtcagattcactgaaaagaggtgaggggaggtgagggacagcgcgaaccatgtctggacagcgagggagggctcaggatgtgcattgccctcctgaggagtttctcttctccccttactcaggtacaaatctattgtcaagtacaagacagctttctactccttctaccttcctatagctgcagccatgtacatggtgagtgagcctcctcacccctctctgctctgctgatgggggcttttggacagcaaggcatagagcagaaaacgtgaacactgctacccctggtgaaaaactgtgtgaccttgagcaagtcggtctcgctcagtctctttcctcagctggggataaaattcctacttcacaggactgtaaagattaagcaaggcaagggatatgaaagtgcttagcacataataggggaacaatatatcctgtatctgagtatggataggagtgtggagatcatccaggttgagagggagaagagtggattaaagacagtcagtgggattaagtgtctaccctgaccttgcttctctacatttccttttcatcttgaaagaagttggaggtggcaaaaatattaggaaggtggatcagaatgacttggggactgacatttgtgagggaagagacaggctgtgcacctctagaatggattcatctcttttatgactcccaggaaggcctagccaaaaataagtgggattgaggttggaccatcagtcaggactgtctaggtcagggaagccaagatgtctgaagagagaggaaagatttggggctgcagtagggcaagaccccatgggaggaagcagccaggaagatgccggcacccctggggtttggcttattaacccccctttccctgcaggcaggaattgatggcgagaaggagcacgccaatgccaagaagatcctgctggagatgggggagttctttcagattcaggtaagaaggcaggaggcagtagcagagaacaggcaccagcttcactcctcctctgcccaggaacctcatccttcctcttttgctgccctccccctccctgcccaggatgattaccttgacctctttggggaccccagtgtgaccggcaaaattggcactgacatccaggacaacaaatgcagctggctggtggttcagtgtctgcaacgggccactccagaacagtaccagatcctgaaggtgcctgagagagggtggtgggtccctgagttggtggaaagggatagagcagtggttctcaactagaggcagttttcctcccgaggggacatttggcaatgtcagcagacattttttgccattgtcattacaactctgtgtgtgtgcatgtggtacagacatctagttggcaggagccaaagatgttgccaaacatgtagtacacagaacagctcccccagacaggattatctggtcccaaatttcaatagtgccaaggtggagaaaccctggagtagaggatgcctggtatgaggcaatatttgggatagggaagggaagcttgggattttagctacgtagagacacttgaaaattggagggaggaaaggagtgggtggctttggagatgttctggaatatgtgaatgaggggagtggaggggtcctggaggctctggggaaggccaagcccgttttcctgtctttcaacctcttccaggaaaattacgggcagaaggaggctgagaaagtggcccgggtgaaggcgctatatgaggagctggatctgccagcagtgttcttgcaatatgaggaagacagttacagccacattatggctctcattgaacagtacgcagcacccctgcccccagccgtctttctggggcttgcgcgcaaaatctacaagcggagaaagtgacctagagattgcaagggcggggagaggaggctctcaataaataatcgtgtaaccttcttgtggttctgttcttgctcggcccagccagagtctggctctttccagaatgtgcagggtggggtgctgggaggactcgctgcacggaaccaggacccaggggccaaaagcttaggatatatcaaaccctctaggtgggtgacaaaagacgctaaacgctgggggcgggtctgagctacgccacgcccatgcgcgaaggggtgcagctgcgcagcgcagggtaggttgtgctagtgcccctcccctcccgctctgtgccccgccgggcggggaccgtgggagccgcggacaagcccaaggccggagcggttccaggaggaccctggtgaggagggctcggcccatgggtgtagaccgatggacctgggcacgaggggcggggcaggacaagggagcaggagaaatgaatagagaaagggtgcggtggtggctgaacgatggagacgaatgcggagagaatggacataccgctgttccgaggggcgagggcgcaggctggagcccggccgaggcagccagcagatgcggagttgacaagctgacggctgctccatccttttcctctccagcccccacccctttcctgcattcaccagacaaactctgcgtattgccccacccccatcctccacctcctttcagggcatctgggtgggtctccctgggtcccttcctctgggagtaaggggtaggctggagggcagggccagattgcggcagcagggacctggaggtccattctgggcccggacctcttccaggcccccgccccccttcggagatccagagcgcagccgcgttctctgaccctcccggctccattcccggggggttacattcgactccatctgcaaacactgcagtggaaactaatggtcagtcgattgcgatttgcatctcattgaaatatcttccaaagcagccagagccttcaggcctgctgctgccgtcaagtcacctcggtgtccttccccgcagctcttgtcctcactggccgggcttcaccacctctgtcttctaggtctgcacctgtggttgccaggtaggtggatgtgagagaccctacccttctggttctctagaagccatcccatcgccgctagcatcatgctgtcccctcagagagctttactctgcaacctcaaccacatccacctccagcacgtctccctgggcctgcacttgtcccgccgtcctgagctacaggaggggcctttgagcacaccccctcctccaggagacactgggggcaaggagagcaggggcccctgcagtggcaccctggtggacgccaattccaacagcccagctgtgccctgccggtgctgccaggagcacggtccgggcctagaaaaccggcaggacccgtcacaggaggaagagggggctgcctctccctcagacccaggctgctcctcctcactcagctcctgctcagatcttagccccgatgagtcccctgtctcagtctacttgcgggacctccctggtgatgaggatgcccaccctcagcccagtatcatccccctggagcagggctccccactggcttcagcaggccctggcacctgctcaccggacagcttctgctgctctcctgattcctgctccggagcttcttcttcacccgatcctggcctggactcgaactgcaacgccctgaccacctgccaggacgtcccttccccaggcttggaggaagaggacgagagggcggagcaggatctccctacctctgagctcttagaggcggatgatgggaaaatcgacgctgggaaaacggagcccagttggaagattaacccaatttggaaaattgacacagagaaaactaaagctgaatggaaaaccactgaaaacaataacactggttggaaaaacaacgggaatgttaactctagctggaaaagtgaacctgaaaaattcgactctggttggaaaaccaacacaagaataactgattctggctcgaaaacagatgcagggaaaattgatggaggatggagaagtgacgtcagcgaggagccggtgccccaccggacaatcacgtccttccacgagctggcccagaagcgcaagcggggcccagggctgccccttgtcccgcaggcgaagaaagatcgcagtgactggctcatagtcttctcgcccgacaccgagctccccccctcggggtcgccgggcggctcctcggcacctcctcgggaagtcaccaccttcaaggaactccggtcccgaagccgggccccagccccgccagtcccgcctcgagaccccccagttggctgggctttggtcccgccccggcccccacccccgcctgtccctccccgaaggaagaagaaccgacctggactgcagcccatagcggaggggcagtccgaggagggccgggctgtcagcccagcggctggcgaggaggccccagccgcgaaggagccgggcgcgcaggccggcctggagggtaagaggtcgcaagaagcgggaggagggctgggcttcggccgctcacgcctcctaggcttccaacccggccccctgtcttccctccattctgtgtcacccatcctccccgccccttctaccagggagcgctccgggaaagggaaactgggtgggtcattgggttatgggactaactgtttgctccctcttcttcccgccccttcttgcctggctgcccatcccgctgccctccttccctctgcgcctggccccgccaatcccgcctgcagccggtcccctcctgctccctcggcccctggttttccggttctcggccgacgggcgccccctgttggagggtgggggcgcaggcgcagctgggtctctgctcctggctcctctggccgggtggcccggcgccgggctgcggctgctgggggcgccgagccccccagaggagcagctgctgcccgtccgcctgtccccggtgggagcctattcgcctccgactcggggagccttgccctgcctggccagccccgagctggcactgctgctgtccccgctctttcccagaagtagcaccttccccgccgcggctcccccaccccgccaggtacccgcccccccgctgccaccgcaacctcgtccgccgaaggcccctcgctggaccaggagcccatcgcctccgcccaggctacgtaagacggacccgggctagccccgcgggccacgcctcaggcgggccgccccgcccactctcgcccggccccgttttcgctttttttccggggttgcccagcttagtcccgcccttcagtttaagccgactccaagcaagtttgkcggccttggggagtctggccccgttcctagtgctggagggggaagttgttgcctttcctgctccgtgggccggccccctctccctccagacccacctgggcatagtggacgcgggcttacccagcctccatgccaagtctagggggtcccagcgagtctgttgttaggggctttgggtcacaccctctgtggaattccttggcctgtgcagctcgggcctgccccccgaccttgctagggaggggtggagggtgaagctcccgggagctcattggcactagaggttctggccacgccctctccgcgagtccagtcccacgcgggatgaagagggcaccctccgccaagaggctgctgcgggacccgggtttcccctttccggcgccttccagcctcccaatcctcgggtctcgcctccctccgtctyctccctttcccctgtctgtctttccattggtccatgccgcccacgtgctccccggggctccgcaggcaggactgggccccggggcggtgcgctgggctrcacctccctccccgcgccccgtcctctcccgccctacaggccctagcagggcaggcgggaggtgagcgcggccatcccgctcccggagttccgggatcctggaggtgggggctgtgccctgagggagggcacagggaaccgggatggggctgggggacagcgagtgctgggaagtgtgcgagatttcactccggggctcgggtcgagctaccccgtgcttcaggcggtcctgcgcctcctctccccaagacccttcggggacacagcactgcagacccgccggagacaacttgtgcgggagcccggagtcctcggaataacasttggtaagtgttaccgcgcccttcttcccttacgccagtccgtagttcgtggtccttcgccggtgtccccggagcccagcggctgtggatggcagaagcccagagtgggactggtcagctgcaggagcagaagaaaggtagggcaccctgactcccgacccygcgcttccgaatraactgcccttcgcccccggccctgctctcaggctgtccgaaggcagtctctccacgcccctcgggcaagcctgggtaggggcgcggcctcctagcgtcttccctttcccactcctcccaggtcttctgatagccgtcagcgyctccgttgataaaatcatctcgcatttcggggccgcccggaacttggtgcagaaggtgaaggtggctggggggaggctgttgggatgasgagagtaatggagctccgcggggggtgcgggaatggttggcgggaggtggctgggaggtgtctggagggatctctggagccatcggcatcgcgccacctccaggcccagttgggtgatagccggctgagcccggatgtggggcacctggtgctgaccaccctctgcccggccctccacgccctggtggcggacgggctgaagcctttccggaaggacctcatcaccgggcagcgcaggagcagcccctggagcgtggtggaggcgtcggtgaagccaggtgagccaggagggcgtgggacccggcagtgcgcagggcagggcygggcttggctgactgcaccccacgttctcaggctccagcacccgctcccttggaaccctgtatagccaggtcagccgtctagccccgctgagcagcagccgtagccgcttccatgcctttatcctgggcctcctcaagtgagttgccttctttccagtgcccttcccacgacctgggactgcaggagcgtcatgggtgggacacagtagtagtgcctcacatccccagagaaggccccccctcttccaatctcatctcccatcctccacccagagaggactggagtcctccacctccctgaacttccattccctcttttctcccctagcaccaagcagttggagctgtggttttccagtctccaggaagatgcaggtcagaggttcagatggtagaggatggggctgatgggctgggaggatgggaaggaaagagttctctcctgctggttcccactgctgccagaatgccattaatccagatctccgatcttattactcttctaattaaaactttctaaggaggcccatcgcccataggatgaaagacccaaagccttggctgtctggcctctgccctcttcccctgccttggagggtcttgccaacagtcttcccgcctggcccttcctgctccagggccctgcttatgctgttcctctaccttctgcccctcctgcttcctctgaactatcattcatcctttgagtccttccccagtgaggccctacctctaccctcggactaggccaacccccacgcctcattttgtatgtgcttctatggctctcctgtcctcctcctctgtagcctttgcactgtctctgttacttgtcaccacttgctgtgtgtgtcttcctatttgggctaggttccatgcaggcggggatgtcagtcctatagcccaccacatccttcctcctctctgccccagtgcccagcagagtgaggcctgggaagatgtgtgctgactggtgggctgctctggggggtcttctgggactaggtccagggcaggagctgatgttggcctgctcttttccaggcctgctctccctcctgtacctgccaacaggatttttctccctggcccgcggtggttgtccctccctgtccacagagctgctgctcctgctgcagccattgtcggtgctcactttccacctggacctgctctttgagcaccaccaccacctgcccctgggcccacctcaggcccctgcccctccaggcccacctccagctctgcagcagactatgcaagccatgctgcactttgggggccggctggcccagagccttcgggggacttccaaggaagctgcttcagacccctctgactctccaaaccttcccacaccagggagctggtgggagcagttgacccaggcctcccgggtctatgcctctgggggcactgagggctttcctctttcccgatgggcaccggggcgtcatgggactgcagctgaagaaggtgcacaggagagacccctgcccacagatgagatggcaccaggcaggggcctctggttgggaagactatttggagtgcctgggggccccgcagaaaatgagaatggagccctaaagtccaggtaatggggtaccttgtcctttctatgaccttctgactctctcagatctcctagcggcttcatttgaaactctctagtgatgatcctttagggcagagattggcggtctgtttttctacagccatgagctaaaaatggttacattttaatggttatgttaagtgcctacataatgatctcaattttctctcttggccctaggtcctaaaatatagttatccccaggtacatgtgggggattggttctaggaccctcacatacactaaaatctgacatactcaaatcctacagttgatgtataggaaaagacagccctcagtatatgtggtattacatcctgagaatacagtattttttgttcggttgaaaaaaacctgcatataggtgaacttgtgcatttcaaacctgctttgtttaagggtcaactgtatttactatctggtcgtttagaaaaatgaaaaacagcctgggcaacatggtgaaaccctgtctctacagaaaaatacaaaaattagctgggcatggtggcacacacgtggtggtagtcccagctactctaggaggctgaggtgggaggactgcttgagcctaggaggtcaaggctgcagtgagctgtaatcacactgctgcattccagcctgggcgacagagcgagaccctgtctcctctccaaacaaacaaacaaaatgccaacccctgctccaggcttcaacaactggtggctctttaatggcttgagatactctctagtggccatttcattctgagcctgtctagaccctgctgggtccataggttccttgtgatttgtggtgttgtggacttttgttgtcatctccctcatcagcctaaaagtgcctgtgtccaataatgaacactctgccctcagcagtgactaacccctgacctcttttgaaccacaattaggccccttagcctctccctccctccaaaccccagggttcttgggttttctggaagtgggttgagctgtgaccctatgtcccttcttttaggagaccatctagctggctgcccccgacagtgagtgtgttggctcttgtgaagcggggggcacctcccgagatgccttctcctcaggagcttgaggcctcagcacccaggatggtgcaaacccataggtaaggaggattggggagaatgcactagtgtgtaaccatgtatgctatcacagcatggatgggaggtagtgtaaaaaaccctgggctttaaaataagaccgtgcttagtgtgcattgcagcttttctatttattatcgatgtgtcactcatttgagccttggatttttttttttttttaagagacaagagtcttgctctgtcgctcaggctggagtgcaggggcacaatctcggctcactgcaacctccccttcctgggttctcctgtctcagcctactgagtagctgggactacaggtgcccaccaccatgcccgtttaagttttggaatttttttttttttgagatggagtctagctctgtcgccaagctgaagtacagtggcatgatctcggctcactgcaatctccgcctcccaggttcaagcaattctcctgctaagccttctgagtagctgggattacaggcacatgccgccacgcccagctaatttttgtatttttagtagagaccggggtttcaccatgttcgccgggatggtcttgatctcctgacctcgtgatccgcccgccttggcctcccaaagtgctggaattataggcgtgagccactgtgcccagccaatttttgtatttttagtagaaacggggtttcaccgtgttgcccaggctggtctagaactcctgacctcaggtgatccacccacctcagcctcccaaagtattgggattacaggcatagctactgcacccggccaggattctttctataaaaaggatatgatgcaataccttttttatggttatagagactaaacataattttttttttgagacagagtctcactctcgcccaggctggagtgtagtggcatgatttcggctcactgcaaccacgcctcctgggctcaagtgattctcctgcctcagcctccagagtagctgggattacaggcacctgccaccatgcctggctaatttttgtaattttagtggagatggggttttgccatgttggccaggctggtcttgaactcctggcctcaaggaatctgcctaccttggcctcccaaagtgctgggattacaggtgggagccactacacctggctactaaacttttttttttttttttttgagacagtgtcttgctctgtcgcccaggctggagtgcaatggcatgatctcggctcactgcaacctccgcctcctgggttcaagtgattctcctgcctcagcctcctgagtagctgggactacaggcgcctgccaccatgcccagctaattttttatatttttaatagagatggggtttcaccatgttggccaggatggtctcgatctcttgaccttgtgatccacccacctcagcctcccaaagtgctgggattacaggcgtgagccaccacgcctggcctaaacattttataaaagcatttggcggccgggcgtggtggatcacctgaagtcaggaattcaagaccagcctggtcaacatggtgaaaccccgtctctactaaaaatacaaaaattagccaggcgtggtggtggtgggcacttgtagtcccagctactcgggaggctgaggcaggagaattgcttgaacctgggaggtggaggctgttgagatcacaccactgcactccagcctggacaacagagactgactctgtctcaagaaaaaaaaaaaaaaaaaaaaaaagtagatggagtagtaggagatccaaacaccaaacaggttttggtgatggattggatgtatggagtgagatgcccaggtttttaccaggggcaagtgtggggagaaagtggtgctgtttaccactataggcgacacgaggaggaactggttttgagggtgagtcatttcatttgcctgtgttgaatttgaagcaccattgagaagtgcaaatagtgtcaaataagcagctggagtgggtttgccactcaggagaaggctggggccccagatagaatcaccaagttgatgaatggttctcaagtccttccagagcccagtcaatgtccactragccaaaccaacaagggcactctagaggtgacgcctggggacggctgggcagccccacctcacctcatcccagtatcttcctctggctcccctcagggcagtgcgggctctctgtgatcacactgctgcaagacctgaccagttgagcttccggcgtggggaagtgctgcgtgtcatcaccacagtggatgaggactggctccgctgtgggcgggatggcatggagggtctggtgcctgtggggtatacctcccttgttctgtagccctgggaccctttcctgcgtatgtgtctccttcctgtcacctgggaatggaatggccagtgaacaccatcccagaagcattttccctctgcaaaatgacgtttcttcccacgtctgtttctgctaatatttaaaataaactttccttcttccctcctatacccacctgtaaggtgaaatctgctcttcttccaaatatataaaaaaggaattgccctccaggtaatccctttcctttttcccgtctatataagggaatgtcttccttcctatctatctgcaaaatggaaatctagacctccttcttcatccataagtggactgtgccagtacaatacatgcctcagcccccaagcctagaaggacctctagtctccttcctgtgtggaatcttccccactccatccctcccaagttgcctgtattgataatgtactcactcatgctgtactaggtgctgaagcctggacacccttggtgggtgggcctgtggtgatggtttgcatccttcctcctttgtcccaataaagtatgggagttgaatgtgtgtctttcactgtgggtttctggacataggctatgggggaggggaaaaaggacctcctatgggaggcataaggcagatgtttcttcctagcccaggtttagtgcttaatgctccctgaagaatagagaagtagtccctcattgcttcctgaatctcacaagtgcttctctagtctatgactttctctgtttagttagactaataggataggagcctgcataaatatgggggaggagagaagacttagcccttgaaattgtacttcatatctgaggtgaagggaaggattaaagatttgcaccgggcacagtggctcagacatgtaatcccagcattttgggaggctgaggcaagcagatcacttgagctcaggagttcgaaaccagccttggcaacatggcaaaaccccgtctctacaaacaatacaaaaaattagccaggtgtggtgacgcatgcctgtggtcccagctagttggagggctgaggcaggaggatcctttgagcccaggaggtcgaagctgcagtgagctgagattgtgccactgcattccagcctgtgtgacaaagggagaacctgtttcaaaacaacaaagagttgtaagaaatgtcaccattttttctactggccaggcccggtggctcacacctgtaatcccagcactttgggaggccaaggggggtggatcatgaggtcaggagacagagaccatcctggctaacacagtgaaaccccgtctctactaaaaatacaaaaaaattagcggggcatggtggcaggcacctgtagttccagctactcgggaggctgaggcaggagaaaggcgtgaacccaggaggcagagcttgcagtgagctgagatcgcgccactgcactccagcccgggcgacagggtgaaaatctgtctcaaaaaaaaaaaaaaagaaaaaagaagtatcaacattttttctacttagtatctatcactctgtgatgatataattccaagtaacccaggcacttgacaacaacaaaaagttccaagtaaaagagaggccaggtatggtggctcatgtctgtaatcccagcactttgggaggctgatgtgggaggattgcttgcggtcaggagtttgggaccagcctgggcagtacagcaagacagtctattaaaaaaaaaaaaaagctgggagtggtggcatgcacctgtagtcccagctactttgggaagctgaggtgggaggatcacttgagcctaggagttcaagactgcagtaagttttgattgcactgtagcactccactccactccagcctgtgagacaaagggcctctctcaaaaaaaaaaaaaaaaaaagtgtatgtatatatatatatatatatatatatatatatatatatatatatgatctagaatagaacaattgcagtagataccaaagtttaaaaattagaaaaaacgcggctggctgcagtgcctcatgcctgtaatcccagcactttgggaggccaaggtggatggatcacctgaggtcgggagtttgagacgagcctgaccaacatggagaaaccccatctctacgaaaaatacaaaattagccgggcgtggtggcacatgcctgtaatcctagctatttgaggggctgaggcaggagaattgcttgaacctgggaggcagaggttgccgtgagccgagattgcgctattgcactccagcctgggcaataaaaagcaaaactccgtctcaaaaaaaaaaaaaaaaaaattaaagataatctcaaaaaaatgtaacagtaacatattgtttttgcaatcatgaagaaaccattatgtaacagtagggcactctgatctagtcttgaacctcaagtccttataggaatagagattgaactgttggagtaagctgtcttgctacttctgagcaattgtattctagctgaactcccagcctggttttttttttgttgttgttttttacggagtttcgcttttgttgcccaggctggagtgcaatggcaggatcttggctcaccgcaacctccgcctcccaggttcaagcgattctcctgcctcggcctcgggcatgtgccaccacgcccggctaatttttgtatttttcagtaaagacagggtttctccatgttggccaggctggtcttgaactcttgacctcaggtgacccacctgcctcagcctcccaaagtgctgggattacaggcgtgagccaccgtgcccggcttcccagcctaaatgtttaactcatgtctgggacaaagttttggtaggcctttcagttatctgcaggaatgggtttatcttccttaattagtagggtcacttttgtctatttatgacacttttctatttgtggaggagtacacagactttggagttctggctccaacactagttactgggtgacctttggcaagttacttaaccttcctgagcttcagttttcactcttacaaaatgggaataacttcagaggactattatgaagattaactatgtgatcttgggcaagttacttaaattgtcttttgcttcaatttcctcatttataaaattgggatttggtacctaccacaaagggcttttgtgaggattaataaacaaatatatggaaactgtttatgatagaaatggtctaacacatagtggcctaaaaaaacgtggcctaaagttatatattgccggcctcagtggttgttactgagaattaatgagatgatgatgcatgtgtgtgcaaaggatggagatgtagaatagcatggcatggttttttgtttgtttttttgagacagagtttcactcttgttgcccagtttggagtgcagtggcgcaatctcggctcactgcaacctctgcctctcgggttgaagcgattctcctgcctcagcctccggagtagctgggattacaggcatccaccatcacgcccggctaattttttgtatttttagtagagacagggtttcaccatgttggccaagctggtctcgaactcctgactttaggtgatccgcccgcatggcatgtttaagaaatagctggggctgggtgcggtggctcacgcctgtaatcgaagcactctgggaggtggaggtgggcggatcatttgtggtcaggagtttgagaccagcctggccaacatggtgaaacccctgtatctactaaaatacaaaaaaaattagccaggcatggtggcaggcgcctataatcccagctacttgggaggctgaggcaggagaatcccttgaacccgggaggcggaggttgcagtgagacgaggttgcaccactgcacgcctgcctgggtgagagcgagactccatctcaaaaaaaaaaaagaaaaaaaaaaaaaagaaaagaaaagaaacagctgggccaggcgtggtggctcatgcctgtagtcccagaactttgggaggctgagttgagtggatcacttgagcccaggagtttgagactagcctgggcaacacagggagatccctgtctctacaaaaaataaaaacattagccaggcgtggtggtgcgcccctgtagtcctagcaactcaggaggctgagttgggaggattgcttgagcccaggaggttgaggttgcagtgagctataatgtgccactgcactctggcctgggcaacacagtgatgccttgtctcaaaaacaaaaaaattaaaaaaaacccaacaaaacagctggactacgttaggcaacacggtgaaactccgtctgcacaaaaagtgcaagaattggccaggcatggtggtgcatgcctgtagttccagctatttgggaggctgaggcagaaggatcatttgagtctgggatgtggaggttgcagtgagccgagattgtgccattgcactccagtttgggtaacagggagactctgtctcaaacacaaaaaacaaaaaagcaactggacatttggtgtgtgttattactgtgctgattgattaggctgagtccagactagaaagatcctagtactgaagaaatgactttatccagtagtcaacggcagtgagtgtgctcatgtgcagcctagcatgtttatgatgttgtttcagaaagatccccttggaaacaggatgaggttgtcttggaagataaatgggggataagaaggaggaaaaaatagcaagctcatcagtccacagttaggaaaagttttttccatttaatactagactttcaaggattgagatgcaagctttgtatgcaattacatccaatgttaaaattggtaatacataatttacaaagattaacatcaaaacaatcatctatttagatatgcttttgtaaaaaggaaatatattagcagcatttatattttccgcaatcacacagcctacagacatgcagactaactctgtatctatttgcagtgatgtagtgctttgccccgcatttcaaacaccaaaacccgcctggcagctggggggttctttttatttcgttattataaaataactgaaaaataaaaaaaggcattaatttctacaccagtaagaaaaaacaagtttttgcacttacctaacatttgattgtctaaaaaacatttcagtttttttttagtctttcaacaaaagaaagataaaatgacagagcgtagtgtcttttgcttctgttctcgcattttacaaagtttttttttctttttcatcttttttaaaattttagtgtttaacactataaaggaaacattgaattttaatctctttcttgtcattttctcgcttttgactaaaaggagacccccaaagtgcccctagtcccacctccctcccacccactccctgcaatgaaaaacaaaagaaaccactcaaacgggcttggacatgcgatttttccagctccacatgtgagtatcttatacccaggtctcttagtaatgtacagtgcttctctacagtaagaaaatactccaaactattttcttaattctcttttttctttaataaaatatttattttgctttttctctgctcaaggggatcattggcatcccctctctcttttgttttttcctcaagaatgacacagaaaggggaaaaaggaaaaaatatttaatggaatggaaggtggtcaatgtgtctacctaaacgagtcagagcatcgtcaccataaggggaaatgtacaattaggacagcattggtccaatattagaaaaaagtaatggggacatgtttactattgtattgcttaccaatcacacagcaggtgtgtgtgtgtgtgtgtatatatatacacacacaccatatatatatacacacacatacacacatatatatacacacacacacacaacttggcacatttaaaaaccatcttttctcttataagaacatctaaaacatatatgcatatgtatgtctgaaaagacaacaaagctttttaaattttatttttaaagagacagtatagtctgttaacttctggtcaagagagtaggaaggaaggagacaccctggatatacctcctgatgtcattcaggagggtgagggaagatgggctaggggtgaagagaaatatactgtctctttaagaaagggacattgaaaactgtacaattaagaaaacaagagtagtgttttcaattgataatctatactcacaacaaatactctgataggtgaatactgctgaacagtttatgtagtgacttttgttgcaggggtgggtttagagttctttttatgtaggtttttaaatgattttattttgaactgaatctccatttgcacagcacagcagacacacaagaactacagcgcattaaaaacagcatgtgtgctggcgggggcctggctttctcattagaaaaaaatatgtttgacaggttatgaagggtaaaacaaaaataattgcaagaactaccgtgcccttctgaccccatgggggccttccctatcccatgattccattttggggagtagaggtagggagggggcagcagttacaagtgctttgagctgtcaactcacattttactttga

SEQ ID NO: 97431 - DNA, 17533 bp, Homo sapiens
tcctgccccagcctcccgagtagctgggattacaggcatgtaccaccacgcccggctaatttttgtatttttagtagagatgggatttcaccatgttggccaggctggtcttgaactcccaacctcaggtgatctgctcgccttggcttcccaaagtggtgggattattacaggcatgagccatcttgcccagcgtttttttcgtttttgtttttttccccgagacagactcttgctctgttgccagactgaagtgcactggcggatcttggctcactgcaacctccacctcccaggttcaagcgattctcttgcctcagcctcccgagtatctgggacaggtgtgcaccaccacgcccagctaatttttttttttttttttttgaggcggagttttactctgtcgccaggctggagtggagtggcacaatctcggctcaccacaacctccacctcctgggttcaagcgattctcctgcctcagcctccccagtagctgggattacaggcacccgctaccacaccagctaatttttgtattcccttttttagtagacggcatttcaccgtgttggccaggctggtctcgaactcctgacctcaggtggtccacctacctcggcctcccaaagtgctgggattacaggagtgggccatgtgccttgcctggctaaaatcttttgagtactcaaagttgctgttgactgtgttggggtcttttattcaggtaacatgtgtattctcatttttatgtcccaagtgtttattccagcatatggtatttatttacctgcttcactaagtagttagtaaattaaaatattaacagtaatgaaagtgtgtcttctgatttatttcagcaataacagtaggcaaataaaatatctttattactaagaaaaaaattgagagaggttaaacaatgtgcttaaggttacagatataacagtcataaagtgtgtattatgttgaatcagtctaataagttgctggctcagatactgctataaaaagagagagcaaaaaactggaacatccctgaggagaacagagcatagagcttattagggcaatccaaaggattgctggcagcagacagggaccagctgaatctcgaaatactgacttccatggtggcatcaatctctgcatttgcatctgtgtggtttgtgacatattgggcagcactgagcagttctcttgcagggccaaagatgtaggaggctaaggtgcagaagaacaatgaatggtacaaagggaactagggaaaatggtacagcttcatgggataagaaacaaaggtgggaggggcctgaggatgggagagaaaaagaggagttaaagaaccggtgggttgaagtgccattaataggaataattgtcatggccgggtgtggtggctcacacccataatcccagcactttgggaggccgaagtgggcagatcacttgagatcaggagtttgagaccagccttgccaacatggtgaaaccccatccctactgaaaaaaaaaaatacacatatgtgtgtgtgtgtgtgtgtgtgtgtgtgtgtgtatatatatgtgtgtgtgtgtgtgtatgtgtgtatatatatgtgtgtgtatatatgtgtgtgtatatatgtgtgtatatatgtgtgtatatatgtgtgtatatatgtgtatatatatgtgtgtgtatatatacacacacacacacacacatatacacacacatacatatatatatgttagctgggcgtggtggcatgtacctgtagtcccagctactcaggaggctgaggcaggagagtcgcttgaacccgggaggcggaggctgcagtgagctgaaatcgtgccactgcactcctgtcagggtgacagagtgagactctgtctcaaaaaaaaaaaaaaaaaaggaataattctcagagctggctgaccaagagacagtaatcagagtagggtgtctgatggacagtttcagaggtacagccattgggggagatgacaggataaagggtgtagccatagatgggtggtggtgaagatctctgagatgaggagctcaaggaattgagaggccagggtgtggacatcaggtaatattataacaccattattagatggagagagctgctgagaactactgccagagtgagttgagtagagtgaactggaggggtagcgtatgatagagctaggtgacatgatgaaggtagtagcccgggatgagggtaggttaaagggtgggatggcacaggtaatggaggatagtggttctggatagtgcttctggcttatctcgtgccttcccatctgtttcctgtagattgacgtgcacctccacgatgccctgggccggccacatcagtgtgggacaattcagcttgacttccaactgcccctgagatttgacctccagtataaggggtataaaaccttgccctatcctcttttcccttgacagtgcatggaataagtccttctgcctttggccctaaaaactaaaccctccacaccctctcctgccagagctgaatatttcttaaaaactggaaggtgatcttgggtacacaattcgtgatacttccaccattccatccacccccccctttttcctttcaaggcaggcgggtgccctggagcgtccagtcctcattcaccgagcagtgctcggttctgtggaaagactgttgggagtgctggcagaaagctgcggggggaaatggtgagacctctgacctggatttctgttctggccccaaaccggatagttatgctccagatcctgtcccccttcatatgccagcctctttccttctcaagtctgctccatacaagcacacttctggccagagccagagtgactaatttgccatcacctgttctttccctaccaggccactgtggctgtccccgttccaggtggtggtcatccctgtggggagtgagcaagaggaatacgccaaagaggtaaggagttgaggtaagggagggggcagaagcaggtccagtagagagtctggtgccctgcagtgggcaggaagaggctgcaggggtggtagaggaaggagcacagccctcacagccacaagactgggctcgagtggctgctgtcctagatgctggaaatcctgtatctaaaaaatgtgactaatgcctaccttgtagagatgtatgaaaattaaacaaattaacaaatgttgaaagccaccaaaagagcacttggcacaaaactgggattgagtacacagttttatttttcctttctagagagaattgaggatatggatggtaccagagtcaaacagctggttgggtagagcagtggctagaaggcaaagtccacggaataactggggggtcatctccagtaggaggcagaaagattgtggggttggggatgaatggggaggaggcctcaatgtggagatgaaatgaggagaggttgctggtaagaagtggagagccccgaggcagggaaaggaggaacagatgggggcattgagggaaaagagcatcagactgttctagctccttaactttccagtaaattaacttcctgtcaccaaacctctgttgcaggcacagcagagcctgcgggctgcaggactggtcagtgacctggatgcagactctggactgaccctcagccggagaatccgccgggcccagcttgcccactacaattttcagtttggtaagctgaacctcagagccaatgttctcccacctgccgtctgcattcttgctgttaagtttaccaagtctggtaatgcatatttgggttaattggggctcattacctgagcaggtaggagccaggattcaggacacctgactcatttgggccctgtgttccttcacattgccctgccctccccataaccacttctgacactcaaaatagttttcctctttttaactccactctagctgttggtgtctgttaggttaattaaccaagggagcatcagagagaaagggacgggagggttaatacagcgttaattacccttgtttattttagacctagatggaatcagccctaagggatgaggagaaaggccttagggagaaaattctggcactgccatgctccctttttcattttccagggttcagggctctatctcaaaggtgaggagcagaaactcctcagccagattacctgattcttgagttttgcacaccccactctccctacaagcacccagagcaagctgtgctgcaatcccagggacttgtacatggcccctttccctcccttaccgcccagtcagcccctgcatacatcctcctcagcagaggcccctcactctgtgaatccagccctaacagacaccaagagccagagtgggactgatgagaggaaactgttctaagggtcagagtggttggggggaggcggggcagtgtgaaggccacaccactcctgccaccttccacttgctctaatacccccttcagacacgcgcgcgcacacacacacacacacacacacacacacagtttctctctgtggggttctcattgtttgtctttctctgcttgactctaatgtctctgacacacacacacacacacacacacacacacacagtttctctctgtggggttctcagtgtttgtctttctctgcttgactcttatgtctctgaccctggggctcttgaccagaagcgataaggcctgcggggactgaagcacttccttgtctcctcaggatgagcaggactggtcatttagtattagcagacacagctgaatacttcctttctgtgaaccatatctgggctctgctcccacccttcctaaagatttaggtctctcaagtttctgcagagcaaaagaaactgttccatgtgggtgaatttgccctgaggttcccaaacttcctctacctgcagtggttggccagaaagagcaaagtaagagaacagtgaacattcggactcgagataatcgtcgccttggggagtgggacttgcctgaggctgtgcagcgactggtggagctacagaacacgagggtcccaaatgccgaagaaattttctgagcctttgtacatagatgaggcaaaaacctgcgagtgccatcagcctccctcacatgggagaccccaacccagctgacaatgtggagcccccagaacttcagaactgtgtggaggcacatgtctgctctcctgaaaagagacttggtttggggaccccacaaaaggagggaagctgtagctgtttggatgtgaggagaatgaaactacaaaaaaaaataaattgggccaggcgcagtggctcatgcctgtaatcccagcactctgggaggctgaggcggacggatcatgaggtcaggagatcaagaccaccctggctaacacggtgaaaccctgtctctactaaaaatacaaaaaattagccgggcatggtggcacacgcctgtaatcccagctactcaggaggctgaggcaggagaatcgcttgaacccgggaggtagaggttgcagtgagctgagattgcgccactgcacccccctaggcgacagagcgagactctgtctctaaataaataaataaataaataaatacaaactggaagctgctggtcatatgtcttcatctctgactctggagaggtgggataaaaggatgttccactttgtctccctcttttttgtcccagagagttagggaaattgaaaagggacagtccagacctcacactggtaggggagatcccttggataggtttcctgctccccgctgtaaactcctttgtgccctgtttccccaaccccagttcatgagttggcagatcccctctccacagaaggcagcctgtagatggagaaactgaggcacaaactaggggctcaaacacctcttgctcctggattctctgaatcagtttctcttgaaggtcataagaatgttctcctctaatcagtcccattcttctcaatcctctgaggaggcttcagggtgactttgggaggagtggcttccagaggaggagcagctgggactgagtcatggcaggaagctgaggagggcgggagatcacaccagacaattataaaagaagagctgrtcctgaagctcacaaccrtaacagccaccagacaagcttcagtggccggsccttcacatccagacttgcctgagaggacccacctctgagtgtccagtggtcagttgccccaggatggggaccacagccagagcagccttggtcttgacctatttggctgttgcttctgctgcctctgagggaggtgagttgggggatcagcacttaggagggggtctgggcttgcatggcaggggtctgggtccaggcatcccagacggctcatcactagcagagtgattctccgtttggctttccttttctgagcaggcccaaagtgggcctaggccagtggagcctttaaccaaggaggcagagagcaggggcacagaaggagaggggttcctagaaactgctgccaagaaacacagaatcccagtcaaatagacaactgagtggggggtgggttcacagagtgagggtctcctgctgatgaggatgtagggaggtggctggtgggagaggcaagggagggaaaaggggcccccaggctgctcaaaaccggattgctggcccagcaagcctcgactgactccctgtctgattagaggagttgaggggtgtccatccacagacccaccctccatccagcacaaacacattctttatctgctttgatgcctgaacaaaacaggaacccctcaatgctatgggtggaaactaagaaaaaaaggaaaagaaaaggaaaaaaaccacccagggcactcctgcaggaagctgctgaggatgtcagcaaatctgtccacttctctgtgaagccccatgccatcattcttcccagctcctggtcttttgtgtctgcagatcacctacaagtgacccttccctgtgcctgtcccagtcccccaggccctaaattgagacctaaactaaggcggagctgagactggctgaaggggaagcactcaaccttcaggaagcctccttaaccaaaggcctaaagatgtttcaagggcctggagtaggagggtgggtggaggaggtggattgggtargctccaaccagctcaaggtccagactttttcctctgaaagctagagacgcatcccagcagagactggggaggacaacccacagccctgagggaaagackggcagaggaaatgagggcctccctccccaatccygtatgccatactccctttaggcccaacctctgagccagtagaggtggagctatcagaccgccacaggctttctcagaacccagctggtcatgtctaggtgtgttggggctgggagaggattaggggacacggggcaggtgaatacagaggggcatctygtgtcttgcttgtctgtcctacactcttgatctccacagcctccccatcccttgctgaagtccagggaaggccctcccagtggccyctgacttgcccttcttccctccaggcttcacggctacaggacagaggcagctgaggccagagcactttcaagaaggtaagagtttgggggagcagcatgggattgggactccaggaggcactgtgggctctgatgtctcccctcttgcttctagttggctacgcagctcccccctccccacccctatcccgaagcctccccatggatcaccctgactcctctcagcatggccctccctttgagggacagagtcaaggtaaggtcaccatcccatgccctcctcagtgaccctccaggtttctaatctggcctatatcccacttttcaggtggaaaggagggaagaggccctcgcccccactcccagccctggctaggagaaagggtgggctgctcacacattcccccttctatagtgcagccycctccctctcaggaggccacccctctccaacaggaaaagctgctacctgcccaactccctgctgaaaaggaaggtgagcgcttgcccaccctccctcacctctatcccactatggatcctgttgacaccaggctgatccctgctccttggtgccctcacccctatcttgcagtgggtccccctctccctcaggaagctgtccccctccaaaaagagctgccctctctccagcaycccaatgaacagaaggaaggtaagcagctccctctcttctttacccacctttacctcatggccttcccccagagcatgggcttcggggcagacaagacrgtgggctctgccactcaccagttgtataaccttgggtaagttacatacttctccaagcctttgtttcttcatctgtaaaattgaggatatacctgttttagaaagttatgtgattagatgtgcaaaaatagcatctattttcacttgcttctctgctgagttcttctttgtgcatgtaaactagccaggctttctctgctagagatggccatcccaacatggcttttgcttactccttctacccagtagacccacctcttccatatcaggaggagataatcatccattccatgccgagagagggtgagtgacagctttggtctgtccatcctcctgccttagtgctcaggaccctggggagaggagcaggaagcccgagccttgagaagcaggaggaggtgggggcaggctgtgagctgacacctttcacacctcgcttctcttttcctttcagttattttaaaaggaagagccacaaattgttctttctcatttccmctatatcctcccaaccctttctcctccaccccagattctttcaatcctcccagctcatccagcctttgtgggttccttcacatgtccccgcttcccactgttttccccattccaggaaygccagctccatttggggaccagagccatccagaacctgagtcctggaatgcagcccagcactgccaacaggaccggtcccaagggggctggggccaccggctsgatggcttcccccctgggcggccttctccagacaatctgaaccaaatctgccttcctaaccgtcagcatgtggtatatggtccctggaacctaccacagtccagctactcccacctcactcgccagggtgagaccctcaatttcctggagattggatattcccgctgctgccactgccgcagccacacaaaccgcctagagtgtgccaaacttgtggtaaggttgggttcttgatgccggggggtgtcctttaaccccagacagtatgtgtgttttaagggttagagcactaggcctgggtctggaggaacctcaggtcccgttcactggccctaccctgggcctccccaatgtgccaggggagcagaggacaaccactgtytcttctttatctgcctgcccagtgtcctttcctggagcctgggaggaaggcaggaatgtggaaagtgggctgatcctcccctcttgctctagtgggaggaagcaatgagccgattctgtgaggccgagttctcggtcaagacccgaccccactggtgctgcacrcggcagggggargctcggttctcctgcttccaggaggaagctcccyagccacactaccagctccgggcctgccccagccatcagcctgatatttcctcgggtcttgagctgcctttccctcctggggtgcccacattggacaatatcaagaacatctgccacctgaggcgcttccgctctgtgccacgcaacctgccagctactgaccccctacaaagggagctgctggcactgatccagctggagagggagttcyagcgctgctgccgccaggggaacaatcacacctgtacatgraaggccgtaagtgggcgtcccagcctccctgagagcctgtttgcctgcctgcccatcttcgacctctgatcctgccagtccatccatccatgtaccccccctgctgtgagtgcgtccacccgttcatctgcttgtggctgtcygtccatccattgtgtttgtcacctgagtttgttcatcttgagcttcgtactacacttctggcctcctccactcatgatccacacacgcatctgtctaccatccatccatcsgtccagctctggcctcacctgaccttctccatccactgttccagctcatctcccggcaccagcttggaacctcatccaggcttccacccgtccaccttcccaagcccacacatcaacagttgcctcctaaccctctacttttttgccattccctttgggcctctcgggctgggagcccctcatctagttgccagggacgataagggaagtcgatggtcaggagagaaggggccaagtgtccagcttctgacttccctctctctggtccacagtgggaggatacccttgacaaatactgtgaccgggagtatgctgtgaagacccaccaccacttgtgttgccgccaccctcccagccctactcgggatgagtgctttgcccgtcgggctccttaccccaactatgaccgggacatcttgaccattgacatcrgtcgagtcacccccaacctcatgggccacctctgtggaaaccaaagagttctcaccaagcagtaagttgcctagtccttccccactctcttcctttcccgaaaacttccttttgggacacctttgggaaaagcaaaatcatgatatcccaaccccatctgatgccagaagatgcccaaagaccctaacycctgcccctttcacaccaacatagtaaacatattcctgggctgatccacaacatgactgcccgctgctgtgacctgccatttccagaacaggcctgctgtgcagaggaggaggtgagtgtgtggagtctagtctccagaggaatgcaggggaggggagggaaagagctagaactgcaggccaccccttctctttagtacctcaaaccagcctttggttataatgactagtgggggaggtgtttttttcttggttccagaaaagtcttcactctgacctggcctgctccccatctctaagttcctattatgccttctccgggccacaagcttctggcatttccagatgtacacatytgtcagtcacaaggaatccagctgtgcaaggcagkcttgcactctctctgggccccaggaggggaacgagggagagagcagtagaagctgatgaaagggggactttggcacccaagtatctacatctgtccttggaccacctccccaccccatcatctgttttacttttctcattcatcagaaattaaccttcatcaatgatctgtgtggtccccgacgtaacatctggcgagaccctgccctctgctgttacctgagtcctggggatgaacaggtcaactgcttcaacatcaattatctgaggaacgtggctctagtgtctggagacactgagaacgccaagggccagggggagcakggctcaactggargaacaaatatcagctccrcctytgagcccaaggaagaatgrgtcaccccagagccctagagggtcagatggggggaaccccaccctgccccacccatytgaacactcattacactaaacacctcttggatttggtgtcctcattgtctatctaatgtctcacccgcagtgttttaagtggatcttggtgccctggcccaggagggcactggcgttttcagacacaccacagacaaacacaccctcctaagcctgcttgtatttccttcagtgcctggcccctgaggcccacggccctgcccccttcactgagcagatgttcacaggctgtgggatgcgaccataactaaacagcttgacgtcactttgccatcttgaatttattcacatattttgaaaggagtgccaccttgttagctagctatcaggactcaaagaagatatggttcttggccttggtgagcccccaaaatgccacagcccagcctaacatttttaaagcttcacttttgatccttagaattcatgccttcattcattcaatatcctttttttttttttcttgagacacagtctcgctctatcgcccaggctgaagtgcagtggcacgatcttggctcactgcaacttgcaaccctcctgggttcaagcgattctcctgcctcagcctcccgagtagctgggattacaggcgtgcaccagcacacccagctaatttttgtatttttagtagagacgggttttcaccatgttggccaggctcccaaagtgctgggattacaggcgtgagccactgtgcctggccaatatccatttattgaacccctatctatgcacactctgctagacttggggatacacatccagaacacacacagcccctgccctgaggttgttcactgtccctgagcctagcaggtgtgacaagtgttgtggtacagggcccccagcgtgctctgagcatgacaggaacgtcccgaggtgggagtggggctgggggcagcacaggtgcacaggaggggcgttgaggtcagagtttctccagtaaagaagtagagggtgtgagcgggcagagtgcgcacaagggtcaaggctgaaaggacctgactctttggtggccttcctctctgatatggctggaatgataagcaggagctcatcactaatgcctcacccgcagggttttaagtggatcttggtgccctggcccagggggcactggcgttttcaagcggaggatgtgttccaatttgccttttaagaatgtctaggccggacgcactggctcacgctgtaatcccagcattttggaaggccgaggcgggcggatcacttgaggttaggagttcgagatcagcccgaccaacatggtgaaaccccatctttactgaattagccaggcgtggtggtgcccacctataatccaaactactcgggaggctgaggcacgagaatcacttgaacctgggaggtggaggttgcagtgagccagtatcgcaccactgcactcagcctggccgacacagcgagactgtgcctcaaaaataaaataaaataaaataatgtctagtcggagagccggggaggtggcgcgcgcctgtaatcccagccacccaaagagctatggtctcggcactgcacttcaacctgcgagacccagtctcaaaaagaaaaaaaaaagtttagtcggcagccagcaaggcgggacgctgggaggccagttcaaagagtgtcgtcccaagtgccggagggacggagctgtagcccccaacctgagctggacccgagggtggcggtgactaggactctcaagccctacaaagctgctcccaggaacccgaggcctcaaggctggatctgaaagaatcggaatgaagactcggaatgaagagtcccaggggaacaagtcctgtgtgactccgccgccaggacgaccttccagaaagcagacttctccgctccagttctagcggagacggagagagtgaaccaagaaccatcatcctgcgccagccaggggcaagcggagcctcagttgctcccaaacccacgcccgcctctccttcctctcctcctccacaggctttcatttatttacttaagtatttttagcccagtagcagtttccagtccagcggctcctcagatctttcgccggctgtccgccccacctgtccgtcagcacgcgagccaatgagcgggcgagggcagcgctgtgccccgcccctgagccggcagcccagtctcgggagcccggggccgcctgggcctcctgcccgccgcgctcgagtctggagctcgagagtgacactgcgcatgtgcgggcgtcctgcgcatctcctacggcctccaggacagaggaaccgggggaggcagggggaaaaggccggcccagcaattcccctaccccccggtcccacgtgtaccctcctggcctgggtcgccccagcccacggggagcgggcggagtcctggcccacgaagccttgtcacctggcgggcgaatccgcaagcggagacttgtctttaaagggctttgggccgggcgcggtggctcatgcctggaatcccagcactttgggaggccgaggcggtggatcacgaggtcaggagttcaagaccagcctggccaagaaggtgaaaccccgtctgtactaaaaatacaaaaaaaaaaaaaaattagcagggcgtggtggcgggcgcctataatcccagctactcgggaggctgaggcagagaattgcttgaacccgggaggcggaggctgcagtaagatcgcgccaccgcactccagcctgggcgagagaggagactctgtctcaaaaaaaaaaagggagcgggggggctttggtctgtgcaggagcttcccggagatgctttagagctgcgtttgcaaagtgcagcgccaaatgctgcagagaggtgggagtcagaggagaggaggactgcggtcccaaaccctagcagtttagtctgtcggggaggagaggaagggaacccggagagcacttgtaagctacagtgctgaatatgaggaggtactgaattgagcatcaaatgctgagagttaaagaattctccctagggaccagccagctattatctggaagcagtgagtttggatagagcctggaagcacgggtagcattgctgttagcaataaaaggtgaacgtgttaacattcactgcaattcgttgtatacactattaaaatataacttgctcaattcaggggcggtgagtaaagtaaaggagtcagagctcctaattattggagaggccagggaaagcttcacagaattcaagcttgagtagggttttgttgaaagggaaggatatacaaagcattgaatgtatgcaaagttcagctaaagtaaacagtcctttttgtgttaggcagagtgctaaaagtactctggctataacgaagactacaacaccaccttcagggactttagcgtctgtggagacttgaacatctaatgttagaaatattctcagaattctgagacagccacctagcctggccttcagggagatcttccaggaagaggaaataacacagaaagtgtggtatatttaaatatacctagccaggcgcggtggctcacacctgtaatcccagcactttgggaggtcgaggccagtggatcaactgaggtcaggagttcgagaccagcctgaccaacatggtgaaagccgtccctactaaaaatacaaaattagccaggcatgatggcgcatgcctctaatcccagctacttgggaggctgaggcagaagaattgcttgaacccaggaggcagaggttgtagtgagccaagattgtgccattgcactccagcctgggtgacagagccagactccgtctcaaaaaaaaaaaaaaaaaaaaggttgagggcatggtgagggaggggactttttttaaaagctcttcaggagatagggttgagagaacctgtttgctggtgtctagggtgactaccaagtttgaggctgtggtaactaaggtaagtgttacagactgaatgtttgtgtacccccaaatgcatttgttgaaatcctagcccccagtgtgatggtattaggaggtggggcctttgggaggtaattaggtcatgagggtggagccctcataaatgggattagtgctcttataaaagggaccccagagagttctctagctcttcctgccctgtgagatacaagaagttggcaggctgcaacctggcagagggccctcacctgagcctgaccatgctggcacatgatctaggacttctagcctccagaactgtgagaaatacatttctgctgtttaacccaccctgtctatggtacttcacagctcatactgactaaggcagcagaacatacaggaggaagaggagcaggtttcacagagggaagacatgagttcaattttggacttctcagtagtcggtgtcctcagtggtagcaacttcaaacggaaggtgtcaaaagtcaaattctggagagttgagtatgaatgggagatgaagaaaaggaggcagcacttgtagcctgctcttaatgtatttctgcactctacactagcagcctattacacaggacacttggatgtctcctagatatcacaaattcagcttcaaaaatgaattcttctaggtatatggaaagatgtgaagaagaaaatatagcaataagttaggtggtaggtatatggttgtttactgtacaatctgtcagtttttctgtatttttgaaatttttcatgataaaatattaagaaaaaagtagtgggcccatcctctttaccctccaactattcttcttcccatgtgccctatttcaataaatagaacaactgtttagtcagttgtttaggccagagaatatcagagttgttaggcctgggaatatcattcttcagtttctctcctttttccttgtagtctaatcagtcgccaagtctctctctttttttttttttttaagatggagtttcactcttgttgcccaggctggagtgcaatggcgtgatctcggctcaccgcaacctgtgccccctgggttcaagtgattctcctgcctcagtctcccaagtagctgcaattacagtcatgcactaccacgcccggttcattttgcatttttttagtagagacatggggtttctccatgtcgttcaggctagtcccgaactcctgacctcaggtgatccgcctgcctcagcctcccaaagtgctgggattataagcgtgagccaccgtgcccagcaatagagttacaccttacaccaaagttaggttataagtcagtacataaggccaaaattacatagttaacataacctttgaaaatccctggccgggcgctgtggctcacgcctgtaatccgggcactttgggaggccgagttgggcggatcacctgaggtcaggagtttgagaccagcctggccaacatggtgaaaccacgtctctaccaaaaatacaaaattagctgggtgtggtggcgtgcctctgtagtcccagctatttgggaggctgaggcaggagaatcacttgaacccaggaggcagaggttgcagtgagctgagatcatgccattgcactccagcctgggcgacaagagtgaaactctgtctcaacaaacaaacaaattaataataaaagtatgcaaaacataaatgtattatagctcaatggatggttataaaatgaacctcctgcaacaaatgcctaagtcaagccaaagcatcccagaggcccccacagtgctgcttcctgatgacgccctcctcccgtgcccatgaaggaatcctgctcccttgatatttagagttatcactcaatcgcttgttaaaactagtttacccctaaaaatgaaccctaaaagcagtcattttggattttgtaaacagctttattggatataattcgcataccattaattcacccatgtaaaatgtacaattcaatgggttttggtatattacattattaatttttaaaaagtatggtaaaataaatgtaagggcggtggctcatgcctgtaatcccaacactttgggagaccgaggtgggcagatcacctgaggtggggcgtttgagaccagcctgaccaacatggagaaaccccatct

SEQ ID NO: 97432 - DNA, 138624 bp, Homo sapiens
  misc_feature (1)...(138624): n = A,T,C or G
aacatcaccttggagttttacaatttaataatgcatactttaaaattcatgataaatcatggaaccccactatactcactaattcaactattgatttctttttgagcaactgactttatgatttatccttaaaagtaaggaagtataccagaaggcaaaaggataaatccacccataaatactagagtctaagttattttcctgaaaaggtgaaaagggaatttctggtctttatcttttcccttatcaccttcaatcacacactttacactgaaattacttgtctctgtctcttcaacaatatactctgaaactttgtttaatatactttttgtctatttctgcatatgggagaccaatcttggattcccaccaaaaatggcctggttaccaaaatacttcttcattcagtagtttggtgtaagtgtttgggtgtatgtgtctatatgtgcattttaactccaaagaatgctaccttcagaaataaccaagatgcagtatgtatataataattcattgggccctttaagtctttgactcaaaaaaatctcccagaagctcctgcatagcccactactcatgaagaaccgctgggtatggagcacacctcacctgatggacagttgatttatgctcaccttaaacgctaattgagaagcagcacaaaagaggaactggaaaaaaactgaattttactcctcatctccgaagatgtgaatatttctaaaatttcagcttgcctcttgcttcttattggcaagtttccttggcttgtaaattttggacagcactatcaaggagctccatggactctctgagagtgacattgactttaaatgacttgggtttaatggttagaccataactgaaattcattttcgcaggctcatttgggttggccctgaaatcgcactggtgagccaggatggagatgaagagaaaaagctgcatcttagaaagttcttcgccaatgcaccgccttttgcccactgaaaaaatcatcactctgctggtcaggtccttgttgatgaggccatccttgtccaagaatcgagctggatcaaagttctccgggttaggccacttcactgggtcatgattcacagaccactggttgacaaaaaccacagtgtccttgggaatgtggtagcccaagacagaggtgttggcagtggtggcatgaggaatagtgacaggcacaaagctggagaagcgcatggcttcataaaggaaggccaggacatagggcaggttgggctggtcacccatacaaggcagacggtccctccccacgacctgatccaattctgcctgcactcgagtctgcacatcaggatacctgtttggtgtttaatgtggagagagaaaagcaagtgagcaaaattcttatttcatctagaaagcacattataatttattttaattccactttttcttaaataggctatctagctcagtgactaaattaatatttctgggaaaaaaaatctaaaacagcttcctaatttctcactaaattacaagatggactttaagaattatatttcctgtaataggccttgcatgactaatgctgtctttcccattataagtcaaaaaactcttaagttttcccagcctcaaaaagcacaatagtagataaggctgacttttccattgggtaccgcagggacagtgcctagggctcacaacactttttaggggcccatgaaaatatttttacgtcttttacaatcttcagacctaaaaaaactcacttttaggtagaagaaaatattttcatacatcattttaatgcattcatctttatatcagggtagtcatgaaatttaatttttaatttttttatagtataaggaatctacaaaggcaaaagcacccagggcccacgaaagttacaatgtgaaagtaaattttttttctccctcatttccctggacaattccaacagacatgctgttctcattttatacaaagataattggtgtcctgatggataaagctacatactgtattttttaaatttgaaagcaaatacccaatgttcataaaattatggtacaaactgtagtacttattcactgttgatgatacaaactgatacaatctttttaaaaaacaaaatcttaatacgaggcaagagacatgaaggtaacctcttcccgcctcattttaaacccagtaatccatgcctagaaatgtattttcagaaaataatttaagagatacaaaaatatgtaaccacaacaggacctaaaattctaaaaattagccaggcatggtggtacacgcctgtagccccagctacctgccagacagcggcgggagaactgcttgagcccaggagtttgggaccagcctgggtaaggtagtgagaccctgtctctaaggtaagtaaatatataaaattaaaataaaaattttaaaaatgcaatcaaggccaatgaccaacattaaagttcaataaatgattatatataactatacattatcatagcaaaatactatatagccatcaaaaattaccaaaataaatattaaaagattagaaatgtccactaccttgagtcaaagtgttagaagtcaaaaaacaagtaactgattgtttgcaactccgaaaaaaaatgtatacacgtatgtgatgaagtggagttatttttagaatcgcttcttcaacattatattgcaggagtctgccaacttttttcatagaaacatgtatggtggggagagccagagagtatctattttagactttgtggaccaaaccctctttgttgcactactctgctctgccttgtgttgtagagtgaacgcagccatcgacaatgtataaatgaatgggcatgactgcgtcaataaaacgtatatacaaaaacagatcgtgtaatttgccaagccctgtcatacgtcttttcactaaaaaggaaaaaaaagtatcagcatattgaattgaaagtgacctccaaattgttttatttctttttgccgcctaattggagtactcggagaactattgtggttctaatgaaaaacaaaggccgtttcaaaagttaaaatgcctatctgcggatgcacaaaaacctatggaacctattccgggatttccttttccctgatctctggttgacttttctttattcgatttctgcctctccctcacccaccatgggtgtttctatgattttaatactaaaaagccattttaagtatacagaaacttttaatttgtgaaggtagctgtacagtatctaaggaaatatagattgcagtggattttaataaggaaagagtcattctctgccttccaaacacctttctgtggcgcctgcagattcagcatctccaactgctcacttgtgctccaagaaatgacacaaaaccaggatttctggtctcttcggcaatcaaaatttgccttgcgaaacatttgcccctagggatagtgtttccacagtaaatactacaggccgcccagttaaatatggatttcagatcaacaagggctaatcttttagtgtgagtattcccgtgtaaaacttacttttcttttgccaaatctggcaacccgacaccagggacctgttgaatccgtgcttagtagagaccaacgtgggcatcagggggtccgctaactgagccaagcgcaggggccagaaacgtctgcaggcgcctcctggatatcccatctgcctttctgaatgctactctgctttcgtaaaagtgactgcttcttgtcttctaccccggcatttctcaaactcctagcgcggaggttttataaacctagcgctgcccgctagttgtggccgccttctgaaagtttctgtgcgggttacctgtcggctggcccggcctccatgggcttccttggcctggaacaaagccctgacgggcggcccgcttttagcgccagggctgggcggcctcggatgcacgccgaggactagcctaggagaggctgctgtgtttaacatatttatgacattaccttttctttcggaactattccagttctgattgtaatgcgccagggagagagatatcagggctcatctccaagcatttaaaaactcttgtttttccggggggtggaggggtctttgcaaatgtgttctcactcgcaagcaggggaggggacgatagagacaagataggagaccggaggggtcggggcaccgctgggtggggcgcgtgcgcgtgtcgcagccctcactgtgagtccctttaccgacgcgatcttggttttgaggggtggggacctggagcgaaaccccaaacccggggccctgcttgcaaactcagcatattctgtctctactccgcctttttcagaggagaaaagacctggcccacgcctcccagaggctttacctggtgaagaggaggagcagccactgcagcgcggtggacagggtgtcctggctggcgccgaagatgtcagtgatagtggccggtacgttctccaaatccagccgcgcgccaccaccgtgcgagtccccggccgccttcttttccgcagagaggataaaggcgtccatcatgtcgcggggggcggccccgggccgaaggctttcgcagtgcctcaagaacttgtccaggatgaagttgctgaagttgcggttgagctgctcgaattcgcggaaaacggtgcgcaccgggttggggaagtactgcagccagggcatcacgtccaccaggctgcccgcgcccaccgtgcgcccgaactcttcgttgtggctgagcagctcacggaactcggggtcgtcgtggctgtagcggcagccgaaacacacggcactcatgacgttggccacggccacgacggtcagcggcctcgggtcgaggaaggcgccgtccgcgctgccgcgcaccagcagcgccaccagctcgcgcgcctcgctcagcacgtggccctcgaggacttggcggctgcgcggctggcgcgtgaagaagttgcgcatcatgctgtgggctgcgcgccgctgcaccttccagtgctccgagtagtggccgaaagccatgctgcggccgccggacaccacacggaaggaggcgaaggccggccggtcggcgaaggccgagccctgctgcaccagggcctggtggatggcgcgctcgccattcagcaccactatggggcagctgcccaggcggatctggaaaacgtcgccgtagcgccgcgccaggcgagcgaacgagaggtgagccgcctggcccaccgccgccgcgtttccgatcagtggccacgcaaacgggcccgggggcgcggaccggagctgccgcctccgttgcctcagcagccgctggcccacatgcacagtggccagcaccgacaggagtagcaggagcgtggtctgctggatggacagcgggtttagcggccaagggtcgttcgggctgaggctggtgcccatgctggggacagagaggagaaggcgtgacactcaggggtgcagagacaggagcgggcgccccacgcccctaccccagcctctggggactgagtgccgttgggtggagaggtcggagctgactctctggagaaatggccgaagacgccccttcccatccccaacccactctcccttggagaagagaaggggcgtgtttccacctcgctgtaacccagcgccaaacccttcccctccccgcaaggcgcgtaacggttcctgcaatctggggacaacgctgcgggcatcgaggcggtggcgcttgatttcctttaaagtacctaccacgccacccgctacctgtaataatccatctgaagaggtcgccgggcagcgcctcggcagacagactgacctgcggggaggtgcggtttccagtggcgcgggacagccggctccgagaaggaactgggacctttgcctagggcaagacgtcaacaggaacccgcaggcccggcctggacacctgctgccctcactggaagctttaactcccactcgagtctcttggcgtcgtcagtgccaggagcgcttggattgggatggggacggagaagggtgcctcgctcgccgagccccgctgcccttggggacctggcaaagtcgaggtttcctcacagcgttgagattgagactgggggtcggtgagtggcgtcaattcccatgcccttgcggctctcacaactggagtcgcagaagcgctcgctcccactcccactccagagtcaaagcgcgccatcccgctcctccgggttttaaggactgggtagaaggagggcagcgcgacctggcagggcggggcctgcggggggcggggcgcgccgcacaccaggccgctttgacccggactcccgtccaggcgcaccggccggcctcggagctctaccagcaggctttcatgggagcggaggtgcccacgtttccattgtgcggtaaccgcgcttcatcacagccacctccaatcraggccgcacggtgtccccagaaccacgctcggtacaacctgccccggccgctgckctcgacttgggagcgcgccycgccccgagcgcacgacctcccttccctctccgcgrcttgagcttgcttcccggaaagccagtgtagtggcagcggtttgcctcacagcgcccctggttggttgtttaaattttatcttaggttctcgcaaacaaattgccacctcagtggaggctctttggcatgctaaattttttccagttcttgcggcgagatcaggaatccctaaaagtagccgctcccccgccccggggccccgacagtgcttgggcacacaaaggctcctggggcgcagctggccctgagatttcccgcgtagaggccactccaggtggcgccgcccgctggtgggcgcggggccgcccaggctgcgatggaagccgttggcgcagggcggggagccaagctggggcgactgggggggcctgggggagctagcggggcgggacccgagcggggcggagagtggcaggaggaggcgaatctccgcgcyccggcgaactttatcgggttgaagtttctsstgtcgcctcccctttgcgtgcggagctgggctttgcgtgcgccgcttctggaaagtcggctccagtcatatccctgggcgctgcctgcggccgctcctcccgcgcttctcacggcacctgacacgcggaggcggcggccgagggtggggtgccggccaccaccacccttggcgtggggtgccggccgccaccaccctcggctgcgcacgcacagtcgcgcctgccaggccagcgaggcggacgcttgggccaccacccgcaggccgagcccgggcgcgtatcgccacctcsstgcgcaccggcggctctgtggtcttcctgggcgcgcttgcggtcgcgaagggggccctccctttataagggaagccggaggcgctygggcgggggtggcttcccccgcctggcgcgccctttcctacatgctgatgcataggattttcaagacagctaagagaacaaggacttcacgaggcggggggaagggcgaactcgagggaagaggtgggatgtatctggttaaccaggtaggaattgtactggcttcatcaaaggataaatataaaagtgataggttcaccagggacaaccctgcactttgagctccactcgcgctgcgaatctcgtgctattattgacctgtttacagatgaataaactagggttcagagaggttgcgtgacttaacccaggtcgcgcagccatcaagaagtggagccagggcttgaagccaccaagtcccactccagatccttcacataagtttacacggaagaaaattgcagataagaggcccaaatgccttctttcctgcctcccttaaaaaaaaaaatgcacgtggggctaggcgcagtggctcacgcctgtaatcccagcactttgggaggcttaagcgggcggatcacttgaggtcaggagttcgagaccagcctggccaacatggcgaaaccccatctactaaaaatacaaaagttagccggacgtggtggtgcacacctgtaatcccagctactcggggatcaggggggaaggcagcagaattggttgaacgtgggaggcagaggttgcagtgagcagagattgcaccactgcactacagcctgggcagcagagtttaagtgagactctgtctcaaaaaaaaaaaaaaaaaaaaaatcagctggaagaactttttaattattgtttttgttttcataattgagaattctgagaatagcagagaagaaatagtatgctaaccctttgcaattaaattgcttatgagggaggccaggggagtgtgcctcatagctgaccctggaatgactgattacattgtaaagaaacacaaaggagtgtctgaaragaatctgacttcttgagagattgaaaccagcaatcaatttgctgacctgataaaraaatgtcttttcgtgatggctttttttatttttatttttatttatttattttttttgagatggagtctcactctgtcacctgggctgcagtgcaatggcgtgatctcggctcactgcaacctccgcctgccaggttctcctggctcagcctcccaagtagctgggattacaggtgcgcaccaccacacccggctaatttttgtatttttctagtagagatggggtttcaccatgctggccaggctggtctcaaactcctgacctcaggtgatccaccagcctgggcctcccaaagtgctgggattacaggcatgagccaccgtgcccggcctgtgatgccttttattcggtatcttttgaagagttttctggaaatgatttcacacaccatgatggggaacttagatagtgatggagttttagtttttgagcagttgcattggtttaataataagcgttggtttcccagaggtgagttggcctacacagcctttgaaatgagtttcatagcaaccttcccatgtccagctttagcaagatccttgcctaataattcaagactctggtgcatgcatcaatctctcatagactttaatttagtagacgggaattatctatgagctaatgccaatcctgagctgttgacattcctgaaagcctttatcacaatacctctgccagaatgagagcagatggaagttgcctttaagtaaattcctatttttaaaaagtataaaacgaggttgttcctaagaccgcctgtccaactcctcaataatgccatctagtttttagatcaactagatgcatgctttcctgccatcgcagatagatcagatatatcctccaagctgtagttccttgggctcagctctttttctaggacatgactcaaaaatcagaggaactaggttggtaagtgctgtcagaaagataagcccttatcrgttatggcaaaccaaaatgactggctatggtaacactttttgcagagaatcttcaagcctggagttcttagggctttatggtgcaaacttcattgaatgccccatccggtaccctgataaggacttcggataaatccagagcagcctgttggcaccccgacccaactcaaggcagagccctgcctctagtgagaatctacgcaggctctttaattatcatcacaacttctcaaccaaagcagggacctaaggcccaggaatctcctttcaatcaacacagaatatgggcattctgccctcccaaatctcaaacttgaattgtttgttgcaaataactttcaaaaagaacagctaagctagagggatagtttaaagtagagagaggtttaaaatatcttatcttgtattgactcgaaggaacaacttaagcttgtttaagcagaacaggaatgcactggcccatgtgcagagaaggataaccgtgatgcttcacaggatacaaggacccaggccgctctaccggctctctgcctatgctggtctttgcttgggctttctctctttgcatggcaaggaagcagcttaaaattaacaaaacaaagagaaagagaacagctctcttccagggtcctagaaggactccagggggccaggctggcatcaggtttttaccctgtgggcaagggcttgttctgtcatcagaaaaaaagagatggcagaacatgctaggaagccaaagagctgacccagtccactccatgtatacatgtctgcccactggtttctttgggttggaggataacctaaggaaacccaaagccattattgttattattattttaaatcagcagatatatgcattgcccttagagccagtagcccagaaagctctgcccttctgctgtcaggctggaactcagttttcttcatggtcttcctctctagtgtgacccctaagtcagtttaatgggtagccactgtgcttttccagtcatctccaaacacacatacccacatgcactgaggagagtggaggagaataagccatctctggyaggctcttgacatttgggtgggcaggattcagtcatcaggcacatgctggtaggcaagaggagcagaaataaggagacacaccaagtggctgagggtgcgatagagggaggaactgtaggataatgcacaccaggggctggaccatgaaaggaatcttaggaattgataccaaaaccctgtgcctcacctgaaatgctccacttccttcctcctggcaatacacaggcagagaaccacagagctaatagaaaggtattttatctaatctcagaagccatcatttgtaggatgcacccttatttttatgtactaacataaagaaaggaagctaccaattataattgcatcatcgactctaagatacatccagatttcggagatgtaaaatggaaagttgagggtatgatttggagctgacaaagcattatacatttcatgcgcgtccgtgtgaagagaccaccaaacaggctttgtgtgagcaataaagcttttaatcacctgggtgcaggtgggctgagtctgaaaagaaagtcagccaagggagacaggggtggggcggttttataggatttgggaaggtaaaggaaaaaggggggttgttctctggcgggcaggagtgggggtcacaaggtactcaatgggggagcttttgagccaggatgagccaggagaaggaatttcacaagaaaatgtcatcagttaaggcaggaacaggccattttcacttcttttgtggtggaatgtcatcagttaaggcaggaaccggcgatctggatgtgtacgtgcaggtcacaggggatatgatggctttgcttgggctcagagggctgacattcctgtcttcttatattaataagaaaaataaaactaaatagtggtaaagttttgggacagcgaaaatttttgggggtggtatggagagataatgggcgatgtttctcagggctgcttcagcgggattaggggcggtgtgggaacctagagtgggagagattaagctgaaggaagattttgtggtaaggggtgatattgtggggttgttagaaggaacatttgtcatttagaattattggtgatggcctggatacagttttgtatgaattgaaaaactaaatggaataagagaaggagaaaaacaggtataaaaggtctaagaattgggacaactcaggacatctgattagagagtgcctaaggagattcagcacagtcctgccagcaaagattatttatttacttcaagagttaagagtggcagtttggggatagcaccaggagatatcagctgtgatggcttggagaaacagcgtaaaccggcagtgtaaataagagcagggcgtgtatgastrgttgagaacggtgaataggagtatgactagacagaagataatagggatgataagtttttttggggcacagtctaagttggtctggtgtctggaatgagactggggcctaataaaaaggagcgtctatacaggagctcaaatgggctgtaccttgtagcattctgaggacaggtctgacttctgagaaaggaaagtcgtaaaagtattgtccagtcctttttaagttggtrgctgagcttggtgaggtgtgtttttaaaagacctttagtccgttctacttttcctgaagacggaggaccataagggatataaagrtttcactgaatactaagagcctgaaaawctgcttggctgatttgactaataaaggctggtctgttatcagactgtatagaggtgggaaggctaaactgaggaattatgtctgacagaagggaagaaatgactgcggtggccttctcagaccctataggaaaggcctctacctatccagtgaaagtgtctatttagactaagaggtattttagtttcctgacttgggacatgttgagtaaagctaatttgccagtcctgggtgggggcaaatcctcaagcttgatgtgtagggaaggaaggggcctgaataatccctgaggagtagtagaatagcagatggaacactgagaagttatttccttgaggatagatttccatgatagaaaggaaatgagaggttctaagaggcgggctagtggcttgtactatagcatagcctgcctttgctggtgtgtggcgattaggcctggtggaactgccrtcaataaatcaagcgtgatcagggtgaggaacaggaaagaaggaaatatggggaaatggggtgaatgtcaggtggatcagagagatacagtcatgggggtcaggtgtggtatcaggaataatgtgggaggccggattgaagtccgggccaggaacaatagtaattgtgggacttaacaaagactgagtacagctgaaggagcyggggagcagaaagtatatgcgtcaggtrtgaggaagaaaatagattttggaagttatgagaaatgtagagagtgagttgagcatagtttgtgatttttagggcctctaaaagtattagggcggcagcagccgctgcatgsagacatgagggctaggctaaaacagtaaggtcaagttgtttgcataggaaggctacagggtgcggtcctggctcttgtgtaagaattctgaccgcactaaccatgcctaggaaggaaaggcgttgttgttttgtaagggattgaggtttgggagattaatcggacacgatcagcagggaragcacgtgtgtttttatgagaattatgctgagataggtaacagatgaggatgaaatttgggcttgactgaagtaatgggggctgtctgtgaagccttgcggcagtacagcccaggtaatttgctgagcctaatgggtgtcagggtcagtccaagtgaaagcaaagagaggctgggatgaagggtgcaaaggaatagtaaagaaagcatgtttgagatccaraacagaataatggattgtggagggaggtattgaggataggagagtatatgggtttggcaccatggggtggataggcaaaacaatttggttgataaggcatagatcctgaactaacttgtaaggcttgcytggttttaggacaggtaaaatgggggaatggtaaggagagtttataggctttaaaaggccatgctgtagcaggcaagtgataacaggctttaaccctttcaaagcatgctgtgggatgggatattggcattaatcggggtaaaggtggttaggttttaatgagatggtaagggatgcatgatcggtcaccaaggagggagtagaggtatcttatatttgtgggttaaggtgggggaatataagaggaggacgcaaaggaggctttggactgggaagaagggcagcaatgagatgtagctgtaatccaggaatagtcagggaagcagataatttagttaaagtggctcgccctaataagggaactgggcaggtgtggataactaaaatgagtgcttaaaagagtattgtctaagttgccaccagagttggggagttttaagaggtttagaagcctggctgtcaatacccacaacagttatggaggcaagggaaacaggcccttgaaaagaaggtaatgtagagtgggtagcctccgtattgattaagaaggggacggacttactttccactgtgagagttacgygaagctcggcgtctgtgatggtctagggggcttccaaggcagtcgggcagcatcagtcttcagccgctaagccaagaagatctgggaagcagtcagagagccttgggccagagttccaggggctctgggagtggctgccaggtgagttggacagtccgatttccagtggggtcccacacagatgggacayggcttaggaggaatcctgggctgcaggcattccttggcctggtggccagatttctagcacttgtagcaagctcctaggggaggaggttctggaggaacgcctggccgctgcrgttcaggcgtttggaagttcttgtgtgctggagatgtggctggggtttgtctcacagtggaggcaaggaattgcaacttttttctattattgtacaccttgaaggcgaggttaattaaatcctgttgtggggtttgagtgccagattctaatttttggagttttatttaatgtcgggagcagattgggtaataaaatgtatattgagaataagacggccttttgaccttttagggtctagggctgtaaagcgtctcagggctgctgccaaaggagtcacgaactgggctgggtttttatgtttgatgaaaacgctatctgatttgggataaagaaaaaggagcattaaccttgactgtgcctttagctccagccacctttttaagagtcaattgctgggcaggtgggggagggctagtcacgaaacgaaactgtaaggcagaccaggtgtgaggaggggaggtgataaaaggattatagggtggaggagcggaggctgaggaagaattgggacctagctgggcctggcgaggagcagcctggggaggtggggagaggtcagatgggtccgtagaaaaggaagattagaaagcctcagcgacgcttggggttgggactgaggggacaggtgggagggaaagaaggaagatttgggatgagttgcattgggaacagagactagagagggaccgatgtgtaaaagaatgcctggatgtcaggcacctcagaccatttgcccattttacaacaagaattatttagatcttgtaggatggaaaaattgaaagtgccgttttccggctatttggaactactgttgagtttgtattggggtcaagcggcattgcagaagaaaataagatgcttagattttaatttaggtgagagttgaagaggttttaagtttttgaggacacaggctaagggagaagaaggaggaatggagggtggaaagttgcccatagtgaaggaagcaagcctagagaaaagagagagtagagacatggagggaaggggtttgggggttcttaccttccagaaaagcgggaaaggggttggggcacggagaagaggttggggcacggaaataagggatgggggcacagagatwagaggttggggtgtggaaataagggattggggcacagagatataagaggttggggcgcggaaataagagattgggcgcagagataagaggtcggggcacggaaataagggattggggtgcagagatacgaggttggggtacttgcccctcctctagaaaagcaggacttgccgctcagggtgaaggagaaggggttggggatttcttgccccccagaaaggaggagaaggggtagagacacggagagaaggggttggggtacttgccccttccccagaaaagcaggacttgccgctaagggtgaaggaccaaggcaggcgtccctgcatggtctgacacctctgaaacctgggtgaataatcattgcagtccctgcaatgattaaacaccaagggaaggctgccttcccagtccctgaccggcgccggagttttgggtccacggataaaacgtgtctcctttgtctctaccagaaaatgaaaggaattgaaattgagagaagggagagattgaagagtggaaaggagaaagtggttgaaggacagtgagagaggttggagaagagagtaagaagaggccgcttacccgatttaaaattggtgagatgttccttgggctggtcggtctgaggacctgaggtcgtaggtggatctttctcatggagcaaagaacaggaggacaggggattgccctcccaagggaggtcccccgatccgactcatggcaccaaatttcatgcatgtccgtgtgaagagaccatcaaacaggctttgtgtgagcaataaagcttttaatcacstgggtgcaggcgggctgagtccaaaaagagagtcagccaagggagacaggtggggccgttttatatgatttgggtaggtaaaggaaaaaggggggttgttctctggcaggcaggagtgggagtcacaaggtactcagtgggggagcttttgagccaggatgagccaggagaaggaatttcacaagacaatgtcatcagttaaggcaggaacaggccattttcacttsttttgtggtggaatgtcatcagttaaggcaggaaccggcgatctggatgtgtrcgtgcaggtcacaggggatatgatggcttwgcttgggctcaggggcctaacaatacaggctgacaaggattctttctttgtattaagcactttytagatttcttggagtggttagcaccawgggtattggctaccaatcctcatttctattaatattatttcatgtagacaaatgtagacaattgatgttttctcaatcctatgtaaagttggtgagaaggtgatttagaagattctgctatttttattgacctaaattaatctaagaaaagatagtcacttgctaagtagttgcagcttaaaacaagtttcctactcctgctccccttccaatctcrttgcccatgagctctgtctggtattagtgaaagtgacagaaatacatgtagtgaaagctacatgtattctagttcctcaccaaaatgcatatttagaggtaaaggggtgtaatgtctgccacttaccctcaaatggctcaaggaaaaaatagaggggtttggggagaaggagagggagagagaggagaatgagaaagtaagtgtggtcaatgttaattggagaatctgggtaaatgggagttctttgtgattccttgaaactcttctgtaattatatcaaaattaaaagttaaatataagaacataaaaaaagatcttcccaacattttgatcttacattgccttcttagcttctcttgagggtttcttgtaagcaaggacagtggaaagaaagtgggattagtctgctgttcagggtcctgcatctgatgtgtcactcctggagttcaggactaataaaaagtttgtgctcaattgcagtctttctcctcagcactatggattataacctgtactttctgtgccgtccttgttctttgaatggcttgagtgtrtcttgtctcttttatcttaggstttcttcaattccttttgaaagcagaagaaatatgatataaggcagtgtcatgcccttagttctactgtgcccctgtgttaaggggcataatctactcagggttctatgtgcttcataaatgcagcaaatggtgctgtgctttaatggtttttcccagcatcattcccagttctttcctttggtttgcttccttctgcccttttccttccccttgcttcatccttctttcttctctctcattctgtctctcattttccctttctctgggtccactcctatcttcctcaccctcattccctcaagacctccactctcgtctcaggtgcccccttttctgttctgctgtctcccttcctctcttcattctctctcacacagaagagtaaagagtcagggcagaggggaaaagagtgagggaaataagaagggggagcagagagatacagcaactaagaaaaagaaaaagaaaaaaatacccagccctggggctaaaagatagtcayggtggtcagtcactttgtctgggctctcaactggtgtacttacctctcctgctcaacgtttgagcatgtgcctctgctgcttaatatttgtggggtgaagctcccaccgacttggcacagtgatgattccatacgaagggaagggacgccagggtctgtggttgtttttgtacgtttgttctctgagcttctactaccacctactctacttcctgaaatagacttttctctcctccttttccttctccttcttctttctttttttttcagagtcttgctctgttgcccaggctggagtgcagtggcaccatctcgactcactgtagcctccacctgccatgttcaagcgattcacctgcctcagcctccccagtagctgggactacaggggtgcaccaccatgcctggctaatttttgtatttttagtaaaggcagggtttcaccatgttggccaggctggtctcaaactcctgacatcaggtgatccacctgcctcggcctcccaaagtgctgggattacaaccatgagccactgcgcccagcctgaaatcaacttttctaacagtgaaagagggagcctactgtccacaactttggtcaatagggaaacactttacttccctaattctttgaccaaccatagaaaacctttaggcagatraaggatactagttttcctttttattttcattttctaaaaataaatatttaccaggttaccaagaaaatacataaagcaacaagtaaaacaccccaccaccaaaagaatgtacatttgggctcagctaagatcacaacatctagccatggacatgttgactggtacagcctccaggtttttggatggttagcatccagattctagtctttctttctctstctgtctgtctgtctgtctgtctgtctgtctgtctgtctstctctctctctctctctctctctctctcycyctctctccctctctctctctctccctctctctctctccattcacctcttagtttttagcattagatctgcattccctcacaggtttttttctctttccacaaatggaccaaaattccggttgaaaactctgggtgtatccagggtttgagaaaataattgatagttaaataacttaagtggttagtcctcccctgcatgatcccaacggagaacacaaaggctggatagttatacgtcagcttttttgaccattgactcccaacaggatttttcccttctactattgaagtgatcatttctcaactgttgtctgttctattgttggactgctttggttagaaagctgtagatgctagaaggttcttcccaatattaagaaaaattctggagtgaactttcttgccttctggtaaatctagagctattctttggagtgacataaagcaagactcattctcctttgctgtcacatgtttgaagatggaattgtgctgcttctgagccatccttccaccaattaaaaatgccccagttccttatctctgccttctggamaatgtgctttttcagtatgtccatctgagtatgggcctgaaactgaacatagtatcccaaatatgacattctgtctagcccaggggggtgtggttacttcccattagacatagtgttactttcaatgcaaacaaagtttttgccctgttttaatatatttgcatcccactattaaaacatctatattctactaagattgtgataagcaaaaatcttcatcctttaatataggacttggtagctggctgagtcttcagttgtacttgtattattgatttttcaaaaaaatactacatgtgagattttacatttatttctattaaatgcatcttgtggctttaggatggtgttctggcctacagaggccatgttgatactcccaggagcacagactaggacaggacaggaagactatccagggaaagcatggcccagtctggactacttctaggcaaaaatctttggactgcggtttatgttatatagttgcatcattatacatccagaatattatgcatattaaattatttttctattttggccagatatttattcttaaaacacacacacgtagtaacatagattcttgttgcaagagagtcaatcagtatataaaaatatgcagaaaaatgagaataaaatgagaaaactcacactcccaccccttcccagagtaaccatgggtaccatgtgccttctatttatgtacatgcatacggttgtacatatagakagatagatagatctacttcatgattttaaactactgcatggtatgaccatgacattattattgtcattactattattattgagacagggtcttgctctgtcacccaggctggaatgcagtggtgtgatcttggctcactgcaacctccacctcccaggctcaagcaatcctcctgcctcaggcttccaagtagctgggaccacaggctcgtggcagcatgcctggctaatttttgagtattttttagaggtggggttttgctatgttgtccaggcttgtctcgaactcctggactcaagccatcttcccacctcagcctccaaagtgctgggattataggcgtgagccactgcgcctggccaacattattttttcaaccatcaacggcgacttagatggtcatttrtgttgttctcaactctattattagagactccactgcagtgatttcacttttctgtgcaattctgaatccatttgcaaatgttcccccagtatcgattctcaatagaaatgcttgagccatagggatatatgcatatatgctacatcctcactgtcttctaaaaaggtttgccaattcccatctctatgaaccttggctttgtaccaagtagaatgtacctaaatacttttccttctataaaggatggttactttgacttagstttgccaacatggaacaaaacaaacaaaacaaaaattttacttgtctttcagacctatttcttctcttaaagaatacatatgcctgtgttcagattatctcctcttcctgacaaatgagggaaatccccagatgaaagctgataaaacattagacgggsgtrattccggacctccacatccctatggaacacatcacagaagccaggattggagagccaactccacacacctccatatcccctcttagatgaatggcaattctttacaggccgtgggcgcaggcccaaatgccttctgggcttgtctaatcctccagaggatatcaaaggcaatacagccagcatacccaatcattaggagtttggcttctgggaccrggcactcttgggtgtgagcaccagctctcttatttataagctgtaaccttggccatgttatttaacccttctgagcctgactttcctcacttgtacaagacaggtaatataccaaccacagagggtggttttgaggattaaatgagatattgattgtaagaaaacaaatagcatagttgatggcagagtgagcacccaataacagttagccattatcattattactactacttactaagtccttacttctgtccagtaaaatccaagacatggcaaggacttgaacctcrcaggaataaaaacatggcccacttggttcagcgtgacagctctcaggrtggcgtgccgttacccacctgcaaattcctaacagcccaaagtggcaccagtcacttcctccttgcgtttctcaggcagcacattgagtggctgctagcatcactccagagccagactgaatctgaatctggctctcctacttacaccggagtgacttccatgctagaaatcgcttctctgggtccagcttacacttaagtgaatggagatgtaaaatggagacgataccagtaccgattatgcagagttgyggtgaggactgaatgaactaatacatgtaaagcttttagaagggtgcctggcatgtggtgggtgctcaggcatcattagctgttatcattattctgtgggaggccatttgccgctgccttaagaaggctgatctcacagaaacatctgctgttggcagaagagctcagcaccaatagccaatttgtgtttccctccaactcccagatggcagctctgcagcactttctcctcatctaatttctcctcacccagacgcgctccacatcaggacccttaggtagtacagagacagttctttaggcagggggatgccatgttcccaaaagagcctgatgaggccatagtaggcctcttccaccaagctatgctttcggtcagtccctctgtgactgttacggatgctttgtagccctgtggcaatgaggctccaggacaacactcatgcaattccctgctgaggagagttcagaaaactccatgctgtgcagtgcaattgggaggaaactcaagggagtgctgtcgtgggacctcccggtggtgatttgtacaaatgamgcaacgctatccagcttcccagaaaacaccgcctttttttcttacattacagctctgagtcaaagtgtactgtggcctcagacctggggcatacagcycatttgacagccacaatgagggaaacagcctacttctggagcctgtaccagaaggcagaacgggagactcccagctctcccttactaaaggccagggaggaaattgtctcgaatgctctccagtccaaaatggaaagttagattcaatggtctgtactcttgggctgastaacctccgtttttccttttcccattgtgctgagtcagccacggggggtgggttgtgcattttaagggtttgaatgcagaaggaaggaaggcttcccagtttctgagccttgagaaggtggcactgtggcctccaaccagcagccatgcccccaggcacctcattctcctacactatttcagggactttctggtgcaataaggatgtgactgagccctgagcccccaggttaccagccacaccccagtggaatcccgggagctacggggtaaaatggaatcctcttccacagcaagtgcacagaaggcactcagggctggtgggaacctccatttctgccctcatttactctggactctgaacctaatacctgaggcttcctgcagcaaatcagagaggtgaagagcaacttacacgtatctttttttttttttttttttgagacagggtctctctatgttgcccaggctggtcttgaactcctgggttcaagggatcctcctgcctcagcctcctgagtaacacatatcactcaacaaggaataaacaccacaacaattttgagtaccacagtcggagcactgtgtcctgctaaatgtgaggagcattctcctctctgatgttatcatcataaggccagggcctgtggcttaagctcctccrttcccttagagtctcccacaccacacaacaagtttggagacagagaaagtagctaatatttccccctaagtgccaggcactgttttctattttttacattgacagtttcatttatttctcccaatcatcctaaaaatattggtatatttagcctgctttatatacaaagggattaaggctcagagacagtaaactatttgccaaatgtcacagaggttgcaagtgagaggggtcaggatttgaattcaggtctgcaggcaccaaagcccatctataccacaccagtacacatttgttgactcactgcgtatcatcctaagtcttacagaagccccacccctctaactacagtaactgtagaggtctctagtactgttatgcctattagggacctgggccaccccactgccttctcctgccctgtgagctgactccctccaggagcccaagaccacaacaagcaaagccatcttgttgccagagcctgatgcaactcacaccctcttcctcccctccccttgcagaatatccttggtatctgcccagcaatttaatctccacaatttacaatcaaatcttgggatggcttagaaaatcttcctttaacacagtggctggaacatgcagagagttggcatgcagcctccacatgggcttcatgactagatctgctacactcaaacccattatattgaaattaccataaaattcacactattccaatcctcagaaatgatggttttatttagaagtaagtgagcaaaagcaatgatttcataggccccagtgccaaaatcttagctcaatgtttctcaaatgttttgttttcagaacctcttcaaagtcttaaaaaatattgtagagtccaaagaactattgtttagctaagtatctatcaatatttataattctagaaattaaagctgaaaaacttataaaatatttgttagttcattaaaaataataaacctaatacatgttaacataaataacattttatggaaaataactagtttccaaaattacaaatatttagtcagagtgggcagttttaaaaaatattgttacaaatctctttaatttatgacttaacagaagatagcaggtgactcacatctgtttctgcagaaagaccccccagtaaatttgtaagagaatgagagttagaaatgcaaataatgttttattcccacagctgtaaccttgtgggtttcctggaaagggtctcaggggccatcccgacggggtgcctggaccacactttgagaaccattgtctaaacttaagagtgtgttttttgggccgggcgcggtggctcacgcctgtaatcccagcactttgggaggccgaggcgggtggatcacgaggtcaggagatcgagaccatcttggctaacacrgtgaaaccccgtctctactaaaaaatacaaaaaattagcctggtgttgtggcgggcgcctgtaatcccagctactcaggaggctgaggcaggagaatggcgtgaaccccggaggcggagcttgcagtgagccgagagagcgccactgcagtccggcctgggcgaaagagcsagactccgtctcaaaaaaaaaaaaaaagtgtgttttttgtttttgtgtgtgtgtgtgtgtgtgtgtgtgaatgtctcttcatccaagaaaaatctaaatgggctattgtcttggcgtaggaagtaggtgagggtgcggtggatttcagaaaaaataatgtcccagttactgattttaagagaatagccctgagacaagtgtgggcgcattgaaacaccactgcaaccctctaaactattgcagagttgccaccaccaggtgtctggctagaaagatgtcatcttcccaagacagctacctgcccagatgatgtaccttagccccaggaaggaggaggaagaagaggcagrcagaatgatgcccaaacccctgcggcccggagacgaggtrgtgcctgagtcaggaagctgggagagcccagctcagtggaagaggcatgtggatcctggttaggtgtgaagccaggagggcttcttagccacagcctgaaatcgaagcccaggatcgagccacagtctgaaatttttggatcgcagctctgccarttaaaccaatggtaacaataataatgtactgtcatatatgtaagaactgccatatatggagcattttgagccaggcaatgtgccaagcacttgacagaaatcatttcattaatcccacacagccaaccctttgagataaccattgccctcatcccttttttacagacaaataaagcaaggcaggaagagttggaattatcaatcaaggtcacacacactatgttggttgagctgaaatttgaattcagttccgccgggctgcaaaaactctctgctgcttcccagctgcaccagctaggcaaactcctgccagaggaaatctcacagttggagtgcagtaggcatagatttctcctacttaactggggggasgctgtagtcacagcgaagggaatattattgtgtcccatgggaagaaacatgaagacggagtggacgcttcattcctactccaatcagccatctggagggttcagggctgaactgtagtgggggcatcacaaaacttagggaggtgaggagcctcccttagggaggtgacagcctgagtacatggcccccaagctttcagatcccttcctgcacccctccccacctagctctgcacttggcattgttgctactagccaggaagtctgagatctgcgcaaaccccgcccttccccgccgcccccgtaagcactaccgtcccttcaaagttcagacgtggggtcctttggagccctgctccctagagggtcgcctggcacatggccacctccacatcccgccccttctgagctcagcctcccagaggtgtgaacttcttacaaacacacactatcacccaattccctggaaaaacaaacaggacaattgtgtgaaaattccattctaaggcatcctcccttctctgtaaccagaggctccaaggagttcagcatagcacgagcttttaatttgcgtgcagacaagcacaaaaggcacaaccggatatacctgttatttcccaatgacctgagagcccgaagtttatgttaagccttgggttatggcacagcttgcacgcaaggcyctgcagctcctgcaggcaattgagaggtggtggtgtacaggacagaggaacaactctgaagtgacagcacataatttaattccccctaagctttccaagcatgcagactgttccttttttgtcagcgtataacctaagtgatttgttctactcaggcaagaaatgtctaatttaaaccacattgcagctaagcccttagtgaagaaggagaactccttgaggcttagccgtgcgtggttaggctggtggtagctgaggcaaagcagacctctttcagcccctgtatttcttactcaggtcatgactggagatacgtgggttggggggctctaatcaccacactcactcttctgtctcacactkcatccctcgtgaatgggtttagttttagtaagaatgtttacaggagagtgttggctacatgtccccaacatcccgggtttgagtcccatctgagccaccaggagttgggtgacttcagggaaacctcttaaactctaaccattgttttttcttctctgagaaacaggacaaatcggtagtgggggtgcacagattggcacattttcgtggcaagcgatctggcttaggaagcaagagatctgtgctccagcctagctttgttcccaactagcagtggatttgcagcaaggaacttttctctgggcctcaatttcctcatctgtaaaataagcaggctggatgaaatggtctttgaagttccttcagctataaaatactatgtatgtcttaaatcacttggagtttgacaaaataatagttataataattttaattattattgtgatttcttcctacaatcccaaagatttcactagccatgcaaatcttttaaaattcttctttaaaagtacttttcttggccttactgacatgaagcaaagaaggattctaggcccccagatggtaggatttggggtagacattctgtgtctgtctcattccccatggaattatcaaatttcccccctagccacgccagactgctaaatggtctctaagtatagcctacatttcaaggctgtttcctcagccaaaaatgccccttctccttgtctgctgtgaaactcccttccttttaccctcctctttccattatgggacagttttctcttctgggctcccttgagcacttcacactattattccattgacttcatgctgttatttttggttttgtattcaatatatctttgctcaactagaccctcaggaactctgtcatctgtaccacccagcctctccttcccagccttccccagcacctggtacacattcatggaagaattaacttttgaaccctgtggatttcatcacaataggataagaatgctgcatgggtttaggatagacgttcacaatctgagatgagcagtgctagccccagtccccaaaggaaacctagttagggtggtgattagagacattttgaacaattacttcaggaaaggatcaaattcattgaaaagctgcttatcttagtgaaaatgttgtaactgtggaaagacataaaagacaaaatgttcataactgtatccttggaagtgcctttctttaaagaataggaatcatctcaccaaagtatttgaagaagaatgtgtgtggttgtttgcatgtagctgcctatacttaagaatgttacatatttcatttctcccaggatcactcagcctaagagaagaattcgaggttacttttagggaggaaaggacacttacactgggaattcaatcgatggtagttaagcgtcctttttctttaataattgggataagtatgacacatacaactttacatagcatgctcggggagtgaggagagaagctagagaagactgagatgagtgaaatgcaggcttgattgagaaactaagcagaatttctactaacagtgagsattgagggagaagcgttcctgtaatggaggggaaatgaataaaacctcgactcccagctcgacagggacctttcttctcctagccagctggaatgcaagctttaaaaaaaaaggaagtgtggggagggctattttttttaataagaygtctcagaaatgatcatgaacacagtaaagctggttttcaaaaaaggaaagtgagaaaagtagtgacaacttgaagctggtagttgaggaagaaggagaacttctgaacccatgaagagagtatacccggtttgggtgggcaggactccaaagcctttaggatcgatggaccagaacagagaaatgaaaatgcaacaagaacagctgtggggaaaaggcagaaggkgggtaggaagcgaagagggtgtgtacttttcctttctgatctgagaaagggaaattttgtgctgggaagagttacgcgggaggaggaaggaaaggcgccaggaatgcctggaaggtatatgatgtctgaccttatgatctcttgcaacaatttctacaccgattgtgtcccttcacctctgctctaaaaatgtggttaggtaaatatctgttttattaacattgtgagaaattagcctcgtttacagaattccacaaaacaacttgcaataatgagaggctgctaggatgtaggtgatactaggagaagcaatgccttgtctgaacccccagggctctggaggcaccgctttgggtttaaaatctttccttagtgaccttgaacgtaatgaaataggagagaacgttgatcttagagtagtaatagcacaaaccacagccttaatgcccagcaggcttagttcgctggaataattagcctaggaaatgcatgacttaagatgtccccacagtggcccccacaaagtctgaaggggaaacaaagagaaagccagagagcctttcatagaagggaaccaactgcgtttacatgcaaaagatccatctcctgtggctacctaagagcagtgactctctgggggtggaataatttatacatgtgtaaaaacatttatttttctacatatttacttsaagcatgtgttaaaatatctgcaaacaactccagaccccctccccatcttatttttatcctaaaggcagtgttacatggatatccaaatgtttagagaggacaatcttaaatatacaaaagaatgataaataaataaataaataaataaataaataaawaaawaaaagatttcctaatttgtcaccacttgcatgctggaaaccgacagcgctaacttgggtaatatccttttaactctgattgaattatatgttaattccttgcggtggtcttagatttcagacgctattagcaaattatggaggaaaagcaagatcrtatgattcatgaaytatcacagcagcaacagtttctaatttccacccatcctctgtgtcatgtgatatgtttcagaaactcacttaaaattgagaaaataagccattcctaattgtacttaagtaaggaaatagctcatttatgaatctaagaagattaaagaatatggctttagtgtgtttgtttagaatctatgccaaaatttttttccgaagcataaatctggttttttttcttttccttaaaaaaaactttaataaagccaaagaaagaaagaaaggaaagaaagaaagaaagagggctccacatgcagtttcagcactaagggatcctgacaagtaattcacctctgctttgaatgtgggatttttgcactctatgatatatacctttggagtggttttgttttctttgtggttttttttttgtttgttttttgttttttgttytttttgtgtgagacagtggatttttttatccatcattgcattattggagttttatgtgatttaatgtataaaaagtgaggctattctccaactagttgtttgggtttctgtaaagttcaatttccacagtttacctcaagaggtcttttaaaaatgaaatttcaagcatgttgcttgatattctttaacatgttctcaattaatttgcaataaagtccagcccccttcctattgcacactattgtacccttcctgcctttttcatgcactgctctccacccaccctggcttcccggctttgcctccaacgtcagagtgatttctgggcttgcttttttktttttyttttgcctggaaacttcttctctgaagaactttcaaatggctgccttcttcatgtatctcctctcggagcatcattccctgaccttcctttctagggctctgaatccaccccattgctgtctatccagtcagtctctcttttctagctggcatccatcacaagcaatctgcttatcttgtttttggtgagtttatatctgtttctaccactggattataaatacttccaggatagagatctagtttatatcactcaccattctcttcccttagtgcctggtatgtagtaggtgttcaataaatgtgtactgaaagaatggatgagtgatatgatattgatctgtacctatttttttctttttagtctatctttgttgagttttggtattgattttatgtgtcagtacctgagaaggagagaagtccttgagttgtttcgtaaatgtggctcaagtgagatgctgaacagtgccagcyatgtggactctgccacagtgaaggaggaaggtagagaaaatgggttccagtgtgtgtgtatgtgggggtgggaggggtgtgttgatttaggggtgtacagaaaatggtggtgtgcttcatgmcttttttttttaaagaatgaaaccaggacatcaactgagcatataagaggggaaagtggtgcagtagggttaaggcataatgaaaagatttagaattatcctaaaagagtaggaaagcaaaccacgtagagatgtataatagaattccagtgttgagtttccattttatcatcatgaatttgaagtgagacagctggaatttgggatttccctaacacttgagctgggaaggtaaattgttaatcacttttatggagccagtgtcctttgaccaagcaatcctagtctaggaatttatcctaaagacaattggacaagtttgagaaaatgcatatacaaagtcgtttaacaaaatattttattataattgacaacaaataaatggaaagtacctaaatattcagcaatatgggattggataaattctgaaacatacaatgggatattttgcagctattaaagactgtctgtctatattcattgatatgatgaataggtatgatgagttattgagtgaaaaaaatgcagttttcaaactagcacatagtgtaaaacccttttttaaaagtcgtttacactcatgtattttagcataaagaaagacatggaaggatgttcaccaaaatgttaaatcttctcaccctcttctatgtatctttttgaattgggtgaaatgttctataatgagtatttgaaaacagaataaacagaaaaaaaaagatttaattagatcccatttgtcagtttttgcttttgttattgttgtttttggtgtctttgtcatgaaatctttgctagttcctatgtacagaatggtattgcctaggttgtcttccagggtttttataatyttgggttttacatttaagtttttaattcatcttgagttgatttttgtatatggtgtatatgtagtcttctacatatggctagcgagttatcccagcaccatttattgaataaggagtcctttccccattgctggtttttgtcagttttgtcgaagatcagatggttataggcgtgcaggcttatttctgggctctttatcctgtttcattggtctgtgtgtctctttgtaccagtaccaggtggytgtggttactgtagccctgtagtatagtttgacgtgatgcttccagctttgttctttttgcatacaattgccttggctatgtaggctcttttttgattccatwtaaattttaaaatagtttttctttccagttctgtgaagaatatcattgatagtttgataggaatagcactgactctgtaaattgctttggacagtatggccattttaatgatattgattcttcctatccatgagcatggaatgtttttccatttgtttgtgtcatctctgattcctttgagcagtgttttgtaattctcattgtagagatctttcacctccctggttagctgtattcctaggtgttttattcttttgtggcaattgtgaatgaaattgcattcctgatttggctctcagcttggctgttgctgatgtatagaaatgccagtgatttttgtacattsattttatatcatgaaactttgctgaagttgtttatcagctgggatctaatgaaacttaagagcttctgcacagcaaaagaaaytaccaacagagtaaacaacaatgatctacagtatgggagaaaatatttgcaaactatacatctgataaagatctaatattcagcatctataaggaatttaaatttacaagaaaaaagcaaccccattaaaaagtgggcaaaggacatgaacagacacttttcaaaagaagacatacatgtggccaacaagtgtataaaaaaagctcaatatcactgatcattagagaaatgaaaatcaaaaccacaacgagatactatctcacaccagtcaaaatagctactattaaaaagtcaaaaaataacagatgctggtgtggttgtggagaaaagggaattcttatacactgttagtgggagtgtaaattagttcaaccattgtggaaagcagtatggcagttccttaaagagctaaaaacaaaactaccattcgacccagcaatctcattactgggtatatacccaaaggaatataaattcttctactataaagacacatgcacacatatgtttattgcagcactattcataatagcaaagacatggaatcaacctaaatgcccatcagtggcagatcagataaagaaaatgtgatacatatataccatggaatactatgctgccttaaaaaaaaccagatcatgtgctttgcagaaatatgaatggagctgggggccactatccttagtaaattcacgcagaaacagaaaaccaaatacctcatgttctcacttataaggaggagctaaatgatgagaacayacggacacaaagaggggagcaacagacattgggacctatttgagggtggagtgtggcaggaaggcgaggatcagaagaaataacttttgggtactaggcttagtacttgggtgatgaaataatctgtacagcaaacccccatgacacaagtttacctaggtaacaaacttatacatatactcctgaaccgaaaataaaagttaaaagaaaaaagaaagacccatctgtatagkgctctctctctctttctcttacttggtttattctcttccttatccattgcatgcattaaccctttagaacttccggtgttctggggaccctgaaagatcagctagcaggattattgcggggctcagtgcagtgatgcagaggcctccaccagcaatcctgaagttgaaagagaatatccacctcccttatgcataagggatagatttgggggtggcattgaaggtctttctctcattttgctggcagctgtagcaatgcattgattagcaggagaggttttctctctaatgagccagaaactaacacttgtggagttcctgctatacaccagcactgtgcagggtgctttacatttaaaaaataaatctgggccgggcgcagtggctcaagcctgtaatcccagcactttcggaggccgaggcgggaggatcacaaggtcaggagatcgagaccatcctgtttaacatggtgaaaccccatctctactaaaaatacaaaaattagctgggcatagtggcaggtgcctgtagtcccagctactcggcaggctgaggcaggagaatggcgtgaacccgggaggcagagcttgcagtgagccragattgygccactgcactctggcctgggcaacagagygagactccatctcaaaaaaataaaaaaataataaaataaaaataaaaaataaatctgtttaatcttcacaataattctacaacgaaaaaattgttatctccattttatagctgagaaaaaaatgaggcacaatgaaacaaaagcacttgcatagcacacaatataggaaggagtggagtgagaatctaaagtcaagtttacagcatgctgttttcaaggcaaaactacttttgatttaaaatcatattcttttctctccccaatctcctccagctagcgtttcatccgtgtggatttgtcaggagacaaggaaaatcaaatttccagcaatgcgtatctagtgtttaacaatcacatcattacacatgaaaaaaatttgaagcttgtcagatcaccattgtatgaaatatttcccacttgggaccatacagctctgtatttttctgatcagttacaatttttaggatctagtctttatcccagagacccagatctgtgtattctgtattcttttgtaccctgtgttattgcttcaccaagagtatactccaggtgatttttttgtgtgtccttaattttgtcattttgtggtcattaataacatcagttaacaataatattattawactgtccactacaatgtgcgtttgtgagcactggcaacaatttagcagaacagaatgagttagattcccaattgtggtagatcacgtgtagtagcgaacagagcacagaaactccggatcytaattcttgatttcctggcagtgataccttcccattccattacataaggtataagtggcagaagatcagggagaaccayagggctgtaagatattttataagttgttaaataaggggacactgctttatttggggcatgtcactcaatctcttcaacattgtgttaggtaggtatcatgaactaaattgtggccacccaaaactcatacctcgaaccccgggtacctcagaacataattgtatttggatatggagtctttaaagaggtaattaagttaaaatgaggttgttagagagggctgtaatctaatatgactggtatccttataagaagattgaaaacacagatgtgcacagagcaaagaccacgtgaagacacaaagaaaacagccatctgcaactcaagaagagagtcccagagcacattgtgatctctgacttctggcctccagaattgtgagacaatgaatttatatcgtttaagccaccagtctgttgtactttgttatggcagcctgaatgggccaatacagtgaggttccctggaagactttcagatggggacttgcatgcaagaagtttaacagggagagctctcaagagcaacccccggagggagagagggaggaaaggaaaattgggcagagagagaagctgacctctgatgcagctgctacaaggttctcagctgatcctagggttctcagctgatcctacagggtgttctggagctgggatggccccgtagagttgcctggaatcaaggcagggcccagggagggagataaccttggcaaaggcagcttccttcagcgggggaattcccagtgagggactcaattgtggctgtttgcagtgggcactggacagctggggagtgagtttctccgccctgacgaggggtctgggtgacatctcacagcatccatcgcagacctgcagctcctagtctgcagaccaggataagcacaatgcctgtggtgcatttccccgcaggcggctgtgaggagctaatgagataatggatatgaaaatgctctgcaaactgtgaagactatcaatatgctgttatgcatcattctctgttatttgttgctatcctgtcctttcaccttccccaggccggaatgatcacattttctctttccctagctttattcctgggtcactagcacagggaaaaaataagaagaaaaatcagagtggaattctaaaaaacaaaggtcctgtgcttttctgcctaaaatatgtacaatcctcagttggcactgtcaggaatggggaccgccctcatggagaagtggyacttccactcctarccagcctctgtgtgagctggactctaaggtcaggagaatgaggaggccgtgaaggtcttggccgtctctttttcccctcatctctactgagacatagatcragacagggacccataaatcaccttggagttaaatcaggggaaaaaagaaaagccctctcaggcaacagcatttcacagcagcaacaggaagttgtagggaaaagagaaaagtcaaaactcaagtgaaaatctgagtcatggttcagagaggccacaaatacctttcttatggagagtcagaagagggaacacagagaaaactgagaggttttttttttgtttgtttgttttgaactttttaaaggagaatttgtttttaatcctgtgaagctagtaaacatctctttaaagaatgtgtgtggtcacacaagttgaagggctagaaaattacctcctcacagcccagatggttttaagtgggaacagataggaaggagcgtgagttaaagctcccacccacactacaggaccctgctgttccagccgctttcctctgccactagctcaggaagagcgagggctgcctctcagacacagggagttcctgcaggctgacttcaggcactccagaatgaggtgtccgtattttcctaagtgctgagggtcaccctacctcctcctcttttattaagattctctgaaccactcagagaatacacaagttaaaaataaattacttcggcagatagtgagggtacagaagtcctcggtaaggttttccttttaatgaaaaccagccccaaatacttttcctttctaacaaagagcagcctgtgaaatcaagctacagacatagatgccascagaggaatactacctgggactaggcatgttcaaaatggcggttccatcttctcttccttttttttttttttttttttttttttttggttagttwgtttgtttttgttgttgttgctgttgtttgagacggagtctcgctctgtcgcccaggctggagtgcaatggcatggtggaggctcattgcaacctccacctcccaggttcaagcgattctcctgcctcagcctcccaagtagctgggattacaggaatgcaccaccgtgcccagttaattttgtattttagtagagacggggcttcaccatgttggtcaggctggtcttgaactcctgacctcgtgatccgcctgcttcggcctcccaaagtgctgagattacaggtgtgagccaccgcgcccagcccatcttccttttctcagtgccagccacgtgtacattaaggaacagacaacatggcgcgggtcaagtggaaagctcttttgcatagtaagatgagggtgaggtagccagccttcctcctgctatgtaaacatcacacctaatcgaactgatctgtgggccctatgtaaatcagacaccgcctcttcaaacctgcctaaaaatttggagaattccgccccagcaagtctttccctttcagaagccccgctctctcgctakagagaaagctgttctcctttctctttcttctgcctattaaacctgcgctcctaaaggcctcctttgtgtccctgtcctaaattttcttggcgccaggtaacgaaccctgggtatttaccccagacaacgaagccgcttcagaatgacaaaacaacagacatggggacttctggcaaacaataaaccacaaatgaacagagagagattagaaaataaatctaatcacagcagaggaggaggggagaaaatagcttctcttcccagaaacacaggagagacagaaagcaggctgccctgttctgcgcctgctccattctccagtaacataccgtcctggtgtagtgagacttttcgcattatagggcccaactagagatccagtcatttttacttacgctgtgagccaagattctgagtaaatgggtttatcttgattgcagttaaagtatctggttgggcacatcctaacatgaatattataccaacaataaaaatcgtggaaatgtggggaaatgtccacgatatgttcataacttaaagtaggttagcagtgcattgtcaacgtaaataaaacagtatattgagtgtgattccaatattgaaaaacaaaataaagagcactaaatctgccaagttcaaagaccagagtgccagatgcaaaatgtttaatgtttctttctgtgatgggattatttttttctttatatttttctgtatttcctgatttttttctacaataatcatgtttctactgtaatctgagatataaaacattagaaaatttggtcagatgagttgttccaggattgtgattatttctccacaaacagatgctcctcaactgataatgggattttgttcctataagcccatcataagttgaaaataccgtatgtcaaaaatgcacttcatacacctgacctactgaacatcatagcttagcctcgcctaccttaaacatgctcagaacacttagattagcctacagttgagcaaaatcatcttatgtaatttattgrctaccataccgaaagtgaaaatcgaatggttgtgttgttcgttgaagtatggtttctacaaatacatattgcctttrtgccatcataaagtcaagaaattgttaagtcaaatcatgagtgaggkatcatctgtacattcatacacacacggtatgaatacatgggggtgtgtgtgtgcatgtgtctatgcatgtaaatgtgtgtttcaaagctctggggtccttcttccttcccagctaggagccccttttcctctgctgagctctcgaatcttgcataattgctcaccacatttctgaaaagacaatctcttggtacagcacccccagccttctaccaagggattccagcagatgttcactcccagctcagcttggatagggccaccaaggagcctgcctttggtctccacagtcacttcctgaagtaagattgaagagggtgggagcaccatggtttgttgacctccagctctgcttgtatctcctttggcagaaggggtcccaggtggtgcctacattctagattttagagaggacaccacctccagagagctgaacccaaaaactgatgagctccaaagacgtgaaaaaggacagaccctgccagacgagcacccttaggttgttggcacggaactgagggaggaaactgggactacccgcctgatgttgcagcttttttattctcccctcgtcactgtgagaggtctggacttcttctgacataaacagcctcctttcatcaaaggatcgtgccatcctttctattttctaagcattaaaaggcagtttaagcagatcagtgaattaggcaaaygtttatattctcccttgcccttttctttttgcatctggtagaatttctcctgttctattgttgatctctttgtaaaagcccgtacattcttagctgccagggcatgtctttggaagcattaccacatacctgtgaatgattaataagctgtgtttggttaataagcaacattcagctctcatattaatcacagatttttaaagttagacacagctggtgacaatttagtgacacagggtcagcttagcttttcttgagcattagctgggaggagaggctgaacgctgccagatgtcaccaaccaaaaaaaaaaaaacctaactgggtcctcagagaggacctgggggatgcaagtgcacacacacacaagagcaagagatccctgttcttttcaagaactccttttctggaggactgtcacctccagagaccccatgcttcctcctcatggttataactttccccaactcttcaagtgtctagagaaagcacattttctgaaccaaaaatcagggtttattgattggccatgagtctcaaattaagaatgccctggaaaaactggagaaaatattgaggcattagcggcattctgcataggctatatttgttcagccacattgaataacttactctatgcttagtacctccagagagtggggttacaaagaagaataccccctgtctagtgggccttcactggtgtgtgaggctcctctgggcaggaactcaattctgacttgtgcaggttgcaagtggagggtcggccgtgctcagctgggctgatggtttcccctattcgagcccttcctggcacagtgtgtctcctctgatttctcgttcccagagcctttcctcaagtagggattgcagttcttgctctcagttccttcagctagagaagcgaggtcctttcactggccctcttcagatcctgttcttgagctcagtccaacaggacacctggcttctctgttcacataggatcttctttgggccaggccaaactttcctcttccatctctcaaattggcccttccctctctcaagaactggctacttctcacggccctcttcttcatctcttcattactcccagtctgacagtggctttgcaaaaatctttcacatttctcctcaccatggtctctctatcgtaaatgaagatccagaaacgtcttaatttatctttaatggataatatagagggtgattcctgtcttcaatcaaagagaaagaggtataaggacaatacacccaggccatttcacctacaaatgctgaccttacaaaagaccagtgggtggggacaggtgagtgaaggtcctaacccagggcttctctgtgctgggaagtcacagtttttcttttcttttcttttcttttcttttcttttcttttcttttcttttatgtgcagaaaatgcaggtttgttacgtaggtaaacatgtgccgtggtggtttgctgcacctatctacctgtcatctaggttttaagccccgcatgcattaggtattttttctaatgctctcccttcccttggcccccacttcccgactggccccagtgtgtgatgttcccctccctgtgtccatgtgttctcattgttcaactccaacttataagtgagaacatgaagtgtttggttttctgttcctgtgktagtttgctgagaatgatggcttccggtttcatccatgtccctgcaaagaacacgaattcttttttatggctgcatagtattccatgatgtatatatggcacattttctttatgcagtctatcattgatggctatttgggtcggttccaagtctttgctattgtaaatagtgctgcaacaaacatacatgtccttgtgtcattatagtagaatgatttataatcctttgggtatatacccattaatgggattgctgggtcaaatggtatttctgattttagatccttaaggaattgccacactgtcttccacaayagaactaatttacactcccaccaacagtgtaaaagcgttcctatttctccacagcctcgccagcatctgttgtttcctgactttttaataatcaccattctaactaacgtgagatggtgtctcattgtggttttgatttgcatttctctaatgaccagtgatgatgagctttttttcatatgtttgttggccacataaatgtcttcttttgagaagtgtctgttcatatcctttgcccactttttgatggggttgtttttttcttgtaaatttgtttaagttccttgtggattctggatattagctctttgtcagatggatagattgcaaacattttcccccattctgtaggttgcctgttcattctgatgatagtttcttttgctgtgcagaagctctttagtttgattagatcccatttgtcaattttggcttttgttgcaattgcttttggtgttttagtcatgaagtctttgcccatgcctatgtcctaagtggtattgccttggttttcctctagggcttttatggttttgggttttacatttaagactttaatccatcttgagttaatttttgtataaggagggggtccagttygttttctgcatatggctagccagttttcccagcaccgtttattaaatagggagtcctttccccactgcttgtttttgtcaagtttgttgaatagcagatggttgtagatgtgtggtgttatttctgaggtctctgttctgttctattggtctatatatctgttttggtatcagtaccatgctgttttggttactgtagccttgtagtatagtttgaagtcaggtagcatgatgcctccatctttaatctttttgcttagaactgtcttggctatacaggctcctttttggttccatatgaaatttaaagtagttttttctaattctgtaaagaaagtcactggtagcttgatgagaatagcattgaatctataaattactttggccattttcatgatattgattcttcctatccatgagcatggaatgtttttccatttgtttatgtcctctcttattcccttgaacagtggtttatagttctccttgaagaggtccttcacatcccttgtaagttgtattcctaggtattttattatctttgtagcaattgtgaatgagattcactcatgatttggctctctgcttgtctattgctggtgtataggaatgcttgggatttttgcacattgattttgtatcctgaggaagtcatagtttttctatgtgcagttccaaagcccctgaagaatgattaaagagcaaattactttctcttttgaagattaaaaagagactcctttttagcaagatcagagttaacaaattactggccccatgccctttcctacccatgtggagtcctcgccttgcatcaaaaagggaagctaacctgcaacaagggagcagccactgccaggaagaaatgcctttgtgccttccctcttcttgccctgctgccttcttcccaagtcagcactcctctcttccctttccacatgcttcctctttcccctcttaggaaaaaaatataatattggatcggctgtgtgtcaagcatctgaggttctaaccatagctccattactaccagtccgtgtgacttggggaatgctgcttaccttctttgagacccagtttcttcattacaagataaagagcttgctaggtgagctctgtgacttctttctacttaaacattttgtgattctgcgttcttagactttgtaataattctctcttaaggtatttgtacattaagttttacatgtcattgtggaatgaacagatttatctctagttacagaatcccaaacttcagcagaaggtgcagggagaaccaaagaggtgagggataaagaaaggggctccgccaaaccatatctctcatcttgttcttgaattaccagccctctggcagtcaactttcttaactggcttccttctggagcccagatttgtttttccttgctctcttaatctctgttcactattttctatagaaattactttagagagaaaccctcttccaattgtatttaaatccaccccccaaatataatttattctcttatgaagctttgaaatggaaamttttccccagaagtaaccaggcattgtgcaaagtcgcatccattttgaacaccaaagcagctgtaacaaataagagatgacaaatgccattgtgtaatttagttcttcatatcagtttgtcattctgactcctttctatttaactggatgctttgtcagactttgtaatctaaccatgtgaagggcagtgaataaaggattaacgaaaccctttccagttttgcatgagcatttgatttttggctaacttcctagctctgttcccatggaaacctgataaaggaaagtacaagtgggccctgattggtaaatcctatctggattgggacaactataaataccagagaagaagccatattttcgagtttccctaagtgcagtgacccttgtaactggcatgaccttgagaagaccatgaaagttatggccatggagttcctccaagagatattagctgctgtgaaatacagggcctctcatatagtgtggcctccacaccccactgatgtgagtctcatttcttcacaactcagtccacatgggggccaaagagaatagcttctgcccactgtgtggatggctttgtggtctgctgcgaggtcccgcagaagaggaagtctggatgtgccctactgacatgctctgcctcctggcctatgaatcttctgggtcaactgctgtctagagtgggccttggcagtcttgtgagtttgcaggtttaatagagccttatgagacctcctggtgggtcttgtggatggaggttttcacttttactggtttgaatgagtgcatttgcctgtgaagctgtgagcatgagacaatgtccagtcttatggtttttactaattgccagtttttctttacaaattaaaaaataattttgtaatgaaaattggcaggtcccacttgagaatattatactaagtgaaataagccagtgacaaaaagacaaatacttttttccacttctctgaggcactcawattcatagacatgggaagtagaatactgtttgccaggggctgggagaggaggtaacggaaagttgccgtttaatggatgcagagttccacctttgcaagatggaaagagttctggagactggttggacaacaacatgaatgcacttaacactaccgattgtgcacttggtttaaaaactgcacatttgtaaaatggttaacgtggcaaactttatgttatatgtattttaccataatttaaaaattttttttaattgacagtttcctctaaatatcacacttaaatcatgttttcaatacacagactaattctaagtgtttccaaatttccttctaagtaatataggaagattttgtgttacttttccaatttcatcctgcaaccacggttaaaaatcactactattcacttcttaccatttgatctgttgacagtttcagccatcagtcactgccggctcccacttcatttagttaccatgyccctcactaacacaagatcgccgtctaggggccaatcgtagaactacaggctacacagaggagaagggagccaggccacctttcccatgcatcccactccttgaacagaaagagcaactaaaaagggaggcaggagttctaagcaccatctttttttcaccagtacagtttccaagatcttgctgctatgaaaataaagatctcctaatatttatagtacttgaggttagaatagtcttctaggtagagtactaatatcttgctgataaagcttttgatgctgaatccttgrttattctcttaatataatatcttctgtgcgaataaggctaaaatgcttgcatacactcttgtactcacttaggaatgtaatagagcagtttgggagagtgactgaatgcttctgctttgggcaaatttgccacaaaatcatattatgcaatcacagggtcacagaacattagaacttaaagagctttagaggcccgtggtctctagcagatccctttgagagtctgataaaaattagaggtttacgtaccataaaatgctattttgcacaaagctttgaataccattttaaaatttcatcatagatgaagaattccagcttgaatcccaccccataatttggaagtgaagtttctgagaagcatcctgtgtgaagaagcagctaaacagaggggaatgggagtcagaactggatgttggaaagagatgtgatcccacagacagtgtaatgctgggttggaaccagccctggtcaaacccattcccccgagtgcacatgtgttccagggagaagcttgctggggaagagagcagcaatttgcccaccagaggcccagatctcctgggagaaatcagctgccatggaacaggagtttttcttcatgctagaaagggaaaagaacatgaataagtggcaatccagggacagccagaaggaacctggacaatggctcaccggctgagcagagatagagttgcactggkkggggggggcgggggtggggggcagttgacagcagcctggattgtgagcaaggagtacgaagaaataataattgaagtagcagaaggtagcaaggggtgcagaccaagagcacaggcactgcagagagaagtctggattatttgtgaggactttccctagggacttctagaaagaaatcactagtgaggtctaaaagaagactggacttccagtgtggtgataggaacattgctctttgagttcttactacaaatgaggaactttgatttgccaggaaacaaagggttcaaagaaccaattgtgatatattttggcttaaatcccccccactgaaatatgacaggagtcaaattggggtaccaggtaagtcttgtgaaggtgctgcctggggagtacccagctgtctggcactttcataatatctttctgaacctcagtttcctcatctacaaaatgggattaggacttgttgagcatcaaggttccttccgacttgaaaaatcttctgattctatgaccaaactggaaggcctgggttgggctctctcagttctgcagatttaaatgagtcatttctgaactgttggcwtaaggcctatccttttcactcaaatattcccttgaggcatcattttttttttttttttcaaaattgggaaagcgaaggatacaagaagttggaaggaaagcccatgaaagaaaaamacatttactataattaagaaagaaaattaaacagatgatgatcagaactgcggttataaattaaagttaactgattccaagagtgtacgccatcagaattcgccctcataactggaaatttagaggcagggcaagcttcaagtttgcctaattcagcagttccaatcccatttccttgggattctcagctctgcctcatctgtgttcagtttaattctcaggctggggataacatggctattgcaataatagggccaagcttgacaacatccagagggagagactctcttttcctatggctctctcttaaaggtggagaattttccagaagccccagcaaacttccccataaatcttattaaacctaattggtccatatgcctattcctgaacctctcactggcagggggatgagattatacttagacaatttaggcctaacctggaagtacaaagactgcaatggggaaggggtgaatatttgaaaaaaatcagggtttgttggaatgaagtgaagaatggctgctgggcagacagtcagcggtatcttgtcagaatcagctgttgaaatgcagtggggcgtatgaccatgctccccatttaacagatggagtagttaggcccaaggtcacacagttgggttagagctagggacaaagacctttctactcaaaacccgaggcttctctatgtacatttcaaaaggcttaaattttggcttatctttttacccagaaagtctacttctgggaattattataaggaaataatgaatgggaataaagagttagaaacaataatttttaacccagtatatttttgtgaaaaaaaaatgggaataatgtgaaagtctaatagtatgcagttagtgaaatcaataatgrtacatacatacaatggaatactatgcagccattacaattataccacagaagaaaaggcaatggcctggaaaaatatattgttcataatatattgttacataaaaagtaggctataaaactgttgtttaacaaaacagatctagaaagattaagagatgtatacagcaacattttacctgtagtttcctctgcatgatggaattgtagatgattttaatctcttagtttgtgcttcttttttccagatttctttggttgaggatatgtaacaaagaatatctttggtgagaacattgcaatcagaaaaaaatgtccgtgtaaccattttttaarattaattctattttcactaagaacactgattttcagacatagctataggtatcacagggttctatatggaatttctagaaatacagtggggagttcatggcaacagccttctcaagacctgtcttccatgcccacgaattcctaggataagaaacaacactcgggaggtttctaaagttcccgacctcaactgccctcagagaggggtcattatatccagggcaatgttagtgagccacagtatgtgcgttgggaaccatgtagagaacaggaaactacagatgctttttaagacacttatgagaattgttctttctamagtttaaagtgcctggcacatatttggtgcctaatactggctaaataaggagatgytggctgtgcgcagtggctcacgcctgtaattccaggactttgggaggccaaggcgggtggatcacgaggtcaggaggttgagaccatcctggctaacacggtgaaaccccgtctctactaaaaacacaaaaaaaattagccgggcgtggtggcgggcgcttgtagtcccagctactcggaaggctgaggcaggagaatggcgtgaacccgggaggtggagcttgcagtgagccgagatcgcgccactgcactgcagcctgggcgacagagtgagactctgtctcaaaaaagaaaaaaaaaaaagataaaattaccagaaaatattaaacaggtaagtatttacctgtttaaaagaaaaattactagaaaatattaaacagtgaaatgaccagtgtgtcctcagcacaacaccttctacaaattatattaggagtagcaaacaaggcagtggctcacacctgaaatcccaacactctgtctgggaggccgaggtgggtggatcacctgaagtcaggagttcgagaccagcctggacaacatggtgaaaccccgtctctactgaaactacaaaaataacctggacatggtggtgggcacctgtaatcccagctactcaggaggtgaggcaggagaatcacttgaacccaggaggcggaggttgcagygagccgagatcgcgccactgcactccagcgtgggcgacaagagcaaaactctgtctcaaaaaaaaaaaaaaaaaaaaaaaaaaaaggagtagaaaacagaatgactctcaggggcactccgctttttctggagttgttcctgggtctcctgaccacccaagtctgactgagttctcccacatttatcccagctgtcacggatgagaggcactttctcttctgctgaccttctrgctcctggtgatactgtctacwgcacagatggaaagtacccaggaaacagcataacaacaacaacaaaaaatcacattttttagcttcaaagcaaacaccaaagttaaaagcccaacgcctgaaggaatttaaggaccaaagttatttagggcagaagctaaaaggaggtggcctaccccctacccacggaccccaggcttcaaataggtgaaggttggaggctgccaggccctgagcaagcatcatcaaagaagagcacatccaagagtaccccagtgctcactctgctttgaagacaaacagccctcctaattagaaacagcttcattcacatgccagatgtccatgcttcccttccaattattttcagaaacatcataaagaaccattagcggcagtgcaaaatatcctgggttgttttttaaaagaatttgtccattcttatgagttcagtttgatatgaagaagattgcaatccgcctattcctaagaggtttttggagcaggagagggactcaagataaggatgtgtaaggatttgatcaccagaaatactaccacatatttggtttaagcataaagaacaagcatcttacaaaaatgttagccaaatgtctctttacatcacacacacacacacacacacacacacacacacacgattagtacaccctgagcatttatctaagaataacatgaacaatcaaaagtttttggaagcagaggatctagatcatgagttatagttctgaattctgtgttggtcagactacttcgaaatacattgtccacttcaggaaaccacatctggaaagggacattgaccaattcaagaaaccccagaaagtgggaagagcacaaccatggtggaccatagacttctttagggcagsgtctgtgccatgcctttgctcacccccactgccctggcacagtgctttatacatagaccatgccgtaagatatttgttgaataaatgagtaaataattcatatgtcatgcataattgttgaaggaagtacagttggttaactcagagaataaaaggtacagaggacatgacagctcatgtcacatacctaaaggggtaccacagagaatagggaaaagatgtattctctcttggtctttggatcagaatgaagactatttagtgaaagctacaggaaagcagctttgacccaggattattattattttgtgtatccaccataaataactgtgtgaggctcgggtacattctcacactcaaactttaatttgagcattagagggatatagaaagaaatttgggcttgtggccagattaataacttgttcaagaaatctttactgagatagtgccagaggatgctgagaagcagggtgaataagtaaccaaaaaggcagggtttcttcctttttgaagcttccggtctattcaggaatgcagacaagtcagcaggtaatcacggtgtgcacaggtgagatggactgtgataagggaagttcgggcgcctcctgcagtgggtgctccagcatcccagggggcttagatgaagcaaaaatgggggatgtgataggggtggaggatgatccagcatgcatatgagctctaaggcaggacagagtggcactttggagaaccctccaccgtccttaaaccagccccacttcccacttccagttctacccactcttggcttaggaaattttctcctctttttgccctgaaaattagccttggtggctgagttttgcttttcaggttctcattgctagtgcttattttgacgcttagtgaccatctcattcctactaytggcccgcagtagggaatcagacctttagtagacacggagctcttcaaatacagagtgaacttggggcatctgatcatgtgggtcaagatgaacactacagaatacaacygagagccacatgtgagtgaagctgtactcgagctgacaatactgacattcaaaaagcaacaggatgatgagaatgttctggaattagagggtagtgatagttacacaaccttgtgaatatactactgcacaccttaacatggtgaattttatggtacgtaaattacatctcaataacatttaaaaaaaaaaaaaaaagcagcagcagatggctgctggaggaggctgagcttaaatacccctggttacacttcctcctttccttgtatttactggaaggagaaggatttgtcctaagatgaatagttttttcatcttcagaaattcctgacaagctactaccctgtcaaggcatgaaaaatttcattagtgctgacttggtacacagtctattaattagtacctaaataattgcatgttgcctctgtgtcatgatttataattgtatgcatgctttgatctttctcatcacaggcagcactgagaagtgaaggaatatttgggaggatcagaagcttggtcctgattttgccatcaacaggaacttgatgacttcaagggagtccccaaaccctgggtttctgttttctcaactctaacatgaggggctagatgcatctggtttagttagtctccatgatggtttagttcgtctccatgatcctgtgaatttcagatgttgaaaatcttcggaaaagccctgaaagatgaacaggtaggagttattgtctatattttacccatgaggaaactaaggacctgggaatctagagggctcattagcttttgaaccagtactagcaatgagttcatctgaattctggtcccaaactcctagcatgagagaaatgtggacctttcattccaggagtttagcatgtaggaggtattcagctggtgagggattaaggcaagattacaggttcttgagaaacataagcgacagagacaagaacatcagaaagggccgctgtgactcgggtcgtggctgccgatggagctcgtaagtcaggagaggttgtttgctgagaagcttgcattccctagagcccaagtgggtgttgccaggaaaccctgagttttccaacttggcaatcagtgcacagctgagtttttataggaaattgcccagctctttggaaattgtatgtggtataaatatggttttgaaattctatatattagcttagcaaaaggcggaaatattttgaaacccatggatttgggagatctgccggcattgctattaaaattactttcagcagaattgtacaatatgacattatattgctcaaaatgactcaattttctaatctttgagacttcttaaaaagaaatgaaccccaagtagagtraaggtggactgcaaaaaacagcttagtctgaatgaaaaaaattcatccttggctctgcatctaagaaactggctgtgtgtcctcagacaattcacttaatgtctcagatcctcaacgtcttcaactgcaaataaaggggttagaggagatcatctttaaagcccaactcagctctaacatactatgattggataccatacacttgtccacattcttttctctagcacttggggatttctgctcttccagcctttacaaatacaacctttcactgtcacactcattcttccttgtccttaaaacagaaagcccaggcatagtctgatgccacttctgagggctatagcaggtggcatctagtgtctctatagtaactatttacactcctagggaaaattatctcacagaagcatagagagcctgaccttgtctataaagacagtaaggtayaawgattaaaagaataggctctaaagtcaggcagacctgggtaaatctgccacctactagagagcttgggcaagcaagttcaccatgcctggtacctagtgagtgctgtgggcctctattctggagggacagcagggccttacgaaaccagcatgagattgtaaatgccttgcaggctggattttcaagaggaaatgctaccccctttttctccaacatctctggcaaaattgctaacccaaaggtactaggcccagctagttatgaaggggatggaagtgatctctatccaagggaagaacatttgaattgatgtttaaaggagttgtttagattcttatgaaggaatagaggaakagtagaggcaaagacagagaaggggatggatgagaataaagaacaagaaaagaagcagtaggagacaaatgagaaggttaaagctgataatttttacttttatgataaaaggaatttctaagcaaattctaaccattttatcaagaagaaacaaattcactaacttatatttctgcttaaagaaatgcatgggcattttcttcgcatgtgcagtttgtttaaaaattaggcattgaatgctttttaaaaaatatctagatctattctggacatgcacattccaattgatagatagatcaaaatgtctgattttcttactggtaacttggcaccagttgccagtggcttcatatgaacctatcagctgctgtgggatggcagagcagttaagagtccaagactagtccacgcaggcctgyagctcccacattctgatgcatcaaagccacagcaagttcctaaaacataggctctggatccagatgcttttggttcaaattttcacttcattatttctcagatgtgtgacttatggcaattacttacttctctaaggctcactttccacatctgtaaaatagggctaatgatagtatttgcttcataagattggggattgaatgggataatgcacttagctcaatactcacccataaactttttttttttttttttttttttttttgagacagagtcttgctctgttgcccaggctggagtgcagtcgtgcgatcttggctcactgaaatctccacctcccaggttcaagcaattctcctgcctcggcctcccatgtagctgggatttcaggcacacaccaacaccccygactaatttttttgaatttttagtagagacaggattttaccatgttagtcaggctggtctcaaactcctggcctcaagtaatccgcccaccttggcctcccaaagggctgggattacaggcgtgagccaccactcccagccaacaatattcaattacatactcaattactatgttctttttctggtaactagaatgtaggatcttatgattggccccaagttcaaagatatgggcaagtaagtataatataagagtgtagatacagattttgtaggatatatgccatggcctctgtcccatatcagtttaatacctattttccaatgtaatgccctgaaatcccagaagaggaaaaaagaatttttttctaacaattagaaacatgataaaaaawactatcaaaggtatattcattcagccatgcaaattgtaaaaccatagcaatcattctatttgtttggtcacagtttaaaaaaggaaatttgctataagaaaaataaatacaaacaaacacaaaaagagttgaatgcyacctgcagaagaagcaccaatccaactattttaccctgcccacattcaccatgtttctcacaattgcctataaaaagtagtcaccatttattgtaccaggcagtgagctaagtgctttatggaccctgtctcgtttaactgtccccagagtcctatgagtaggtatgttagtgccatgcccatatcacggataaggagatatgccaggtcagagaggcgagttgggattcacacgcagcagacttgctccagggcctgtgttctcaacactgcatggtgccgcttctgatctggattgttaaatctcagcacccagcactcctggcttgggtagaagggaatgggcccagaggtgctgagaatggatctcatgtacacctagggtcgaagttggaacagagagtatgtggagagcctgggctaagactgaagccgccatgatgaaaaccaaactcaagcagtctygttttttaaaaccaatgggagtagtaaagtataaatgtaaatctcagttatcttatcatgccaccctataggtgtttccagtagttactttagagctatcaaagatacatctgaaataacggtactgtgtatatacttgagtcctcttccccagcttgacactcctaggagtcaggtgttctctgggccagatcatttgcccacaaacatagcaatatgcctagccttctcattatataaggtcccccattatatgggggaccttatataatttcatcatatggatgaaaaatgggattattttattatttgactcttctctctaggattcaaagtgcttttatttatagattttcatgatttaaccaattcacccaagaagtaggaagagggcagctttattattttcaaattgtggactgagaaactgagatatgcagaaagaaataaagctgctctgcaatttggaaaaccatctgtgatgctataaaaacgtctcactgtactctcaaccacataaatcactatttttattgccttctctctggatgagatgtggcttaatttgagagagctgtttatcatttggcaagctgaaagaacctaatttcaagtctccattctagtgggtggtaagaataaagggaatttgctttaagggaagaggaaatgataagaatgggaaggaaacggttagacctaaaaaaaatcgattttgaaaccctttggattatcatggatttaatttgccaagcatgggtgaggggtcacatggaatgggtttgaattctaagccaccattatgaccactcacttaatgtttcttcctaccactcccattctacagtgagcccatgattaagataacaacagcttaaatgagttagtgcatagtatggtttggctctgggtccccacccaaatcccgtgttaaattgtaatcttgagtgttggacgtggggcttggtgagaggtgatttgatcatgagggtgatttctaatggtttagcaccatccccacagtgctgccttatgatagagttctcaggcgatctggttgtttgaaagcatgtagcacttccrctgcccttctcctgctggccatgtgaaggtgtgcctgtttctcctttaccttctgccatgattgtaagtttcctgaggcctccccaaaagcagaagcctttacagcccacagaactgtgagctgattaaacatctttctttataaattacccagtctcaggtagtttttatagcaatgcaagaacagactaatgaagaaaattggtaccagagaagtgaggcattactacaaagatacctgaaaatgtggaagcagctttggaactggataatgggcagagggtggaacagtttggaaagctcagaagaagacaggaagatgaggaaatgtttggaatttcctagagacttgtttaatggttttgaccaaaatgctcatagtgatatgggcagagatggccaggctgatgaggtctcagatggagatgaggaacttattgagaactggagtaaaggtcactcttgctatgctttagcaaagagactggtggcattgtgctcctgctctagggatctgttgaactttgaccttgagagatgatttagggtatctggcagaagaaatttctaagcatcaaagtgctcaagatgtggcctggctgcttccaaaagcctaactcatctgcataaacaaagaaatgacctgaaaagggaggcaaagcataaaagatagataggaaaatttgcagcctagccatgtggtagaaaagaaaaacccattttctggggagaaattcaagcccaatacagaaatttgcataagtaaagaggagccaaatattagcagtcaagacaatggggaaaatgcctatgaggcattccagagacctttggggcagcccctcccatcacaggcctggaggcctaggagggaaaaatggtttcatggggccaggcccagggccctgctgctttgtgcagccttggggcatggcaccctgcatcccacttgctccagctacagctgtggccaaaagggccccagatacttctcagactgctgctccagagagtgcaagccacaagccttggtggcttccatgtggtgttaagcctgcaagtacaaagaggatgagagttgaggcttgggaacctccacctagatttcagaggatgtatggaaaggcctggatgtccaggcgggagtctcctgcaggggcagagccttcatggagaatatctagtagggcagtgcaaaggggaaatgtggggttggagcccccacacagagtccccactggggcactgcctagtggagctctgaaaagaaggtcatcctcctccagaccccagcttgcactgtgtacctggaaaatccacaggcactcacatcagtccatgaaagcagccacaggggatgtaccctgcagagctgcccaaggccttggaagcccaccccctccatcagcatggcctggatgtgagacacagagtcaagattattttggagctttaagatttaatgaccgtcctgctgggtttcggacttgcatggggcctgtagcccctgtgttgtggctgagttctcctttcyggaaatggagtatttacccaatgcctgtactcccattgtatcttggaagtagctaacttgtttttgattttacaggctcataggtggaagggacttgccttgtctccgattagactttggacttggacttttgagttaattctggaatgagttaagactttgggggactgttgagaagggatggttatattttacaatgtgagaggatatgagatttgggaggggccaagggtggaatggtatggtggggctttgtgtccctacccaaatctcatgttgaactgtgatcccgagtgctggagggagggtttggtgggaggtgattggatcacaggggtggtttttaatggtttagygccattcccccaatttcttaggaaatctgcttgtttgaaagtgtgtagcatctcctttgcccctctcctgctgctaatggcctgtttccccttcaccttgtgccacrattgtaagtttcctgaggcctcccccagaagcagamgcctgtacagcccacaggaaccatgagctgactaaccatcttttctttataaattacccagttctttatggcaaygtaagaatggaccaatagagcacatcactagggtagcacaaaggagagggcccagaagcagaggagagataaacagctcatttttttcatctttctcaatgtttcttgctcactctctgttgtttgcatccatttttcatttcatcccatttcctcttttttccctttcatttcctcattttgggacagcaagaggtcatgttcttgctgccaacagttacgacattttcagtagtcatgacagccacaaagccagggctggacttgtccagaagtctgatctgcagcaggagggagtctgtagtgtgcaggggctctccagctgtcacttagatcccaagctgccccttcacttttaattttgctgatggtggcttttgtcaaaggcaatttaaaatttagggctaggtagtctaatctgtcaatcttttcttttctttgtggtttccaggtttgtgtcttacttaggagggccttcccaatgctaaaattatatatataaacagatataccacaattgcctaaacagaaatttgggcaagctggcacatttgaaacagggctgtctcctaaaatttggaacgtgtggatagcgtgcatatgcttggactctaggacttactttctctggaaaaatccgtctagcttcctcactcactgcctctgcctcccagctccagcctagccatttcatcttatggtgggggagcactcagttgctagggccagaaacccactcagagtaacttaagtaaatggggattacttgcacagtgataacggaatactgtgaaacccagtttgaagaattgcacctggatcactgaagggctagagtctggagctgcccttcctcctccctttctctcagttatctttgtctctgctccatcctcccccttcgtcaagcatactctgttaccacatgaccttaaatgactgtctaactcagtccttgagcccacagaatcttgtgagtctagcactcacagataaaaaaacaccctcaggctttctgtgtyccaactccaagttctagataaagatgtctgattggttaaagtgggtcatgtttaaagtgggtctactcccaattcagttattggtggccagggccatgagccacatggttgccccttggggcagtgggcaaggtaaagttcacaagatgtggtggggaggaaatgaccactgtaactctgtggtccagttcccacacccatattgtgatttttgctccccttcaagtttgcccttgatgttgtctgtaactgaattctgttttctcccatggttagatttataccagatccaggaccttttagggagggctgtggtcctgtccccttggggaggctctgatctaagactgctccctcatggaaattaaggagaaggggaaagcctaggctacagatggagaaggatgagtcattccagcagccatggccaagggaactcytggagacgtagggactgtttatgtggccactcaccatcatgcaggcccccaatgggggtgaggcaaggaaggacatagaaagactgctcaagtgcatttctggttttgcttcctaccgcaaacgactcttgtcatatgactgggggagtgtggtggtggcaataagcagaaaaatttgagtctaagagttgctttctgaattctcttattagggtcaatgtagtctaaagaagttgacttttgaggaaataaatcttttctgttttctgcagccagactaaggatttagtggtgaatggtaggtgggaacatagtgggactctgactgctcatacggcctctgtgaggctcaattcttttatctctaaaagagagaactgtctacctggtaagagaagatcttttgggagcccactaaactctaacataatgttattatacagtaagttctcacttaatgtcatcgacagtttcttggaaactatagctttaagcaaaatgacatgtaacaaaagcrtttttttctcatcaacgttataacaaaacgttaaaggaagtgacattatttatgaacctgctgcatgttgttttgcttaaagttacagattccaagaacctatcgatgacattaagtgaggacttactgtactagtatcatttataacttataaaaatgacttaattaatataccacaaaatatgcagctttcatgttagagaccagataaatatgaatattttgttaaaatgtctctcttctctactttaccagtcttcaccaacctcctccctccagaatattcctcaagaatataaaatgcctcatcaacatgagacaacagcaggaagcacccattcgtagtaatcctctgtatggaggaggctgttacataaccacaaaggcacaaagctgcagttttgagaacatcttcccacgccagttctaagcattgacttcaactatggttgctaacacaagaatcggcactggtgacttttgagccatcaatcatcctttcctaacacatgaatcttttggaaaagtatgtgagattggagattacctgtgatggtttggatttagattttgcctccaggtttaggcaatggtaaataggcaggagtttaataggaactaaggttatttgakaattcctgggccactgcaaatagaaagtgttggcaattttgtcttttgggctgcctctgattgaaggcacaggcctgtttcatgaagttctgaaacatgaaccggctgtatctgcgtcaaagtcagtggtaaccaggttaatagcactgacaaccatgttctttttacaggaaacacaaacgtgaatcacttgttcttacttttcttttacagtggtctcaaatrgtcaagaccccctgctgggaggagcttctatcctgctctgtggaagaaatgggcatgccagatgcctggaagatcagaggctcacattccaggtgggtcaccctggttcttctcatcagaatcaactagagagatgggctccctctccatccctacccacgggcattggtcaggctgaaagcaaagaaagacaatccattgcccccaggagaactggtcttactctaaatcagtggcctgcaaactgtttatgtggatgtccggatagtacattttttgcctgtgtgggccttccagtctgtcttagttactcaactctgtgatttttgagcaaccattagacagtatgtaaatgaatgagcatggccccatctggccctccacccacaggccatagtttgctgactcctgcaagagtaaaaccctttatgaactagagagttccaggcttgaacatgggtccagaaaatatgggaaggcaaacctcacacatttgtggttgtgtgcctcctaagtgctttgtgtcactgttggcttccaattcctaggaagggccttgggcaccaaccgtatgttgacccagggagaaaaggacttttgggagtgagagtcagagaatgggtaccacgtacccttcagatccctcagctttcagattgacacagcaacagatcatagtctcctaaattctctggcttaaagcatggagccacacttatcctgccaggctgggkccccagttcttagatgaggctagcagtagccatgaggagtgggcatgtggctagtacaagagaaggaatgctaggtggcacttggtcagcaactttccaatatcatgtttcttaattgtatcaccaaatgtgtattatcgtcctgtcttttttttttttaattattatactttaagttttagggtacatgtgcacaacatgcaggtttgttacatatatacacatgtgccatgttggtgtgctgtacccattaactcgtcacttagcattaggtatatatcctaatgctatccctcccccctccccacaccccacaacagtccccsgtgtgtgatgttccccttcctgtgtccatgtgttctcattgttcaattcccacctatgagtgagaacatggggtgttcggttttctgtccttgcaatagtttgctgagaatgatggtttccagtttcatccatgtccctacaaaggacatgaactcattattttttagggctgcatagtattccatggtgtatatgtgccacattttcttaatccagtctatcattgttggacatttaggttggttctaagtctttgctattgtgaatagtgccactataaacatacgtgtgcatgtgtctttaaagcagcatgacttataatctttggctatatacccagtaatgggtcaaatggctgggtcaaatggtatttctagttctagatccctkaggaatcgccacactgacttscacaatggttgaactagtttacagtcccaccaacagtgtaaaagtgttcctatttctccacatcctctccagcacctgttgtttcctgactttttaatgattgccattctaactggtgtgagatggtgtctcattgtggttttgatttgcatttctctgatggccagtgatgatgagcattttttcatgtgtcttttggctgcataaatgtcttcttttgagaagtgtctgttcatatcctgtgcccactttttgatggggttgtttgtttttttcttataaatttgtttgagttcattgtagattctggaggttagccctttgtcagatgagtaggttgcgaaaattttctcccattctgtaggttgcttgttcactctgatggtagtttcttttgctgtgcagaagctctttagtttcattagatcccatttgtgaattttggcttttgttgtcattgcttttggtgttttagacatgaagtccttgcccatgcctatgtcctgaatggtattgcctaggttttcttctagggtttttatggttttaggtctaacatttaagtctttaatccatcttgaattaatttttgtataaggtgtaaggaagggatccagtttcagctttctacatatggctagccagttttcccagcaccatttattaagtaggggatcatttccccatttcttgtttttgtcaggtttgtcaaagatcagatggttgtagatatgcagcattatttctgagggctctgttctgttccattgatctatatctctggtttggtaccagtaccatgctgttttggtgactgtagccttgtagtatagtttgaagtcaggtagcgtgatgcctccagctttgttcttttggcttaggattgacttggcratgcgggctcttttttggttccatatgaactttaaagtagttttttccagttctgtgaagaaagtcattggtagcttgatgrggatggcattgaatctgtaaattactttgggcagtatggccattttcacgatattgattcttcctacccatgagcatggaatgttcttccatttgtttgtatcctcttttatttcattgagcagtggtttgtagttctccttgaagagatccttcacatcccttgtaagttggattcctaggtattttattctctttgaagcaattgtgaatgggagttcactcatgatttggctctctgtttgtttgtctgttattcgtgtataagaatgcttgtgatttttgtacattgattttgtatcctgagactttgctgaagttgcttatcagcttgaggagattttgggctgagacaatggggttttctagatatacaatcatgtcatctgcaaacagggacaatttgacttcctcttttcctaattgaataccctttatttccttctcctgcctaattkccctggccagaacttccaacactatgttgaataggagtggtgagagagggcatccctgtcttgtgccccttttcaaagggaatgcttccagtttttgcccattcagtatgatattggctgtgggtttgtcatagatagctcttattattttgagatacatcccatcaatacctaatttattgggagtttttagcatgaagggttgttgaattttgtcaaaggtcttttctgcatctattgagataatcatgtggtttttgtctttggttctgtttatatgttgaattacatttattgatttgcrtatgttgaaccagccttgcatcccagggatgaagcccacttgatcatggtagataagctttttgatgtgctgctggattaggtttgccagtattttattgaggatttttgcttcagtgttcatcaaggatattggtctaaagttctctttttttgttgtatctctgccaggctttggtatgaggatgatgctggcctcataaaatgagttagggaggattccttctttttctattgattggaatagttttagaaggaatggtaccagctcctctttgtaactctggtagaattcgactgtgaatccatctggtcctggactttttttggttggtaagctattgmttattgcctcaatttcagagcctgttattggtctattcagagattcaacttcttcctggtttagtcttgggaggatggatgtgtttgaggaatttatccatttcttctagattttctagtttatttgcgtagaggtgtttatagtattctctgatggtagtttgtatttctgtgggatcgstggtgatatctcctttatcattttttattgcatctatgcagttcttctctcttttcttctttattagtcttgctagcggtctatcaattttgttgatcttttcaaaaagccagctcctggattcattaattttttgaaggattttttgtgtctctatttccttcagttctgctctgatcttagttatttcttgccttctgctagcttttgaatgtgtttgctcttgcttctctagttcttttaattgtgatgttagggtgtcaattttagatctttcctgctttctcttgtgggcatttagtgctataaatttccctctacacactgctttgaatgtgtcccagagactctggtatgttgtgtctttgttctctttggtttcaaagcacatctttatttctgccttcatttcattatttgcccagtagtcattcaggagcaagttgttcagtttccatgtagttgaggggttttgagtgagtttcttaatcctgagttctaatttgattgcactgtggtctgagagacagttagttataatttctgttcttttacatttgctgaggagtgctttacttccaactatgtggtcaattttggagtaggtgtggtgtggtactgaaaagaatgtatattctgttgatttggggtggagagttctgtagatgtctattcggtctgtttggtgcagagctgagttcaattcctgagtatccttgttaactttctgtctcgttgatctgtctaatgttgacagtggggtgttaaagtctcccattattattgtttgggagtctaagtctttttgtaagtcactaaggacttgctttatgaatctgggtgctcctgtattgggtgcatatatatttaggatagtttgctctccttgttgaattgatccctttaccattatgtaatggccttctttgtctcttttgatctttgttggtttaaagtctgttttctcagaggctaggattgcaacccctgcctttttttgttttccatttgcttggtagatcttcctccatccctttattttgagcctatgtgtgtctctgcacgtgagatggatttcctgaatacagcagactgatgggtcttgactctttatccaattggccagtctgtgtcttttaattggagcatttagcccatttacatttaaagttaatattgttatgtgtgaatttgatcctgtcattatgatgttagctggttattttgctcgtacagttttttcctagccttgatggtctttacaatttggcatgtttttgcagtggctggtaccggttgttcctttccatgtttagtgcttccttcaggagctcttttagggcaggtctggtggtgacaaaatctctcagcatttgcctgtctgtaaagtattttatttctccttcacttatgaagcttagtttggctggatatgagattctgggttgaacattcttttctttaagaatgttgaatattggtccccactctcttctggcctgtagagtttctgctgagagatcagctgttagtctgatgggcttcccgagagatcagctgttagtctgatgggcttcccttgtgggtaacccgtcctttctctctggctgcccttaacattttttccttcatttcaactttggtgaatctgacaattatgtgtcttggagttgctcttctggaggattttctttgtggcattctctgtatttcctgaatttgaatgttggcctgccttgctagattggggaagttctcctggataatatcctgcagagtgttttccaacttggttccattctccccgtcacgtcactttcaggtacaccaatcagatgtagatttggtcttttcacatagtcccatgtttcttggaggcttggtccatttctttttattttttttctctaaacttctcttctcgcttcatttcattcattttgtcttccatcactgataccctttcttccagttgatcgcatcagctactgaggcttgtgcattcatcacatagttctcgtgccttggttttcagctccatcaggtcctttaaggacttctctgcattggttattctagttatccattcgtctaatttttttttcaaagcttttaacttctttgccattggttcgaatttcctcctgtagctcggagtagtttgatcatctgaagccttcttctctcaactcgtcaaagtcattctctgtccagctttgtkccattgctggtgaggagctgcgttcctttggaggaggagaggcactctgagttttagagtttccagtttttctgctctgttttttccccatctttgtggttttatctacctttggtcttcgatgatggtgacgtacagatgggtttttggtgtggatgtcctttgtttgttagttttccttctaacaggcaggaccctcagctgcaggtctgttggaggttgctagaggtccactccagaccctgtttgcctgggtatcagcagcagtggctgcagaacagtggatattggtgaactgcagatgctgctgcctgatccttcctctggaagttttgtcttagaggagtacccagccatgtgaggtgtcagtccgcccctactggggggtgcctcccagttaggctactcaggggtcagggacccacttgaggaggcagtctgcccattctcagatctcaagctgcgtgctgggagaaccactactctcttcaaagctgtcagagaggaacatttaagtctgcggaggttagtgctatcttttcatttgtctgtgccctgcccccagagttggagcctacagagggaggcaggcaggcctccttgagctgtggtgggctccacccagatcgagcttcccggctgctttgtttgcttaatcaaacaactaactgggccacggctggcgcccctcccccagcctcgctgccgccttgcagtttgatcttggactgctgtgctagcaatgagcaagactctgtgggcgtaggaccctctgagccatgcgcgggatataatctccttgtgtgccgtttgttaagcccattggaaaagtgcagtmttagggtgggagtgacccgattttccaggtgctgtctgtcactgctttctttgactaggaaagggaattccctgaccccttgcgcttcccaggtgaggcgatgccttgccctgctttggctcgtgcatggtgtgctgcacccactgtccggcactccccagtgagatgaacccggtacctcagttggaaatgcagaaatcacccgtcttctgcatcgctcacgctgggagctgtggaccgaagctgttcctattcggtcatcttggctcctcccccgtcctgtcttaaagagaagaaatatgagtctctcctgcctgacagaaagttccaggcagcagaagcatgaccttggcattatggcagacagagaggtgtcctttgcttgtgcctttccttcaacctgcctgaccccggctctgctcagcagtgacccatgctctcttgaccacttgtctccagcagacctgtgatttgtccaccttgctgcatcctgggctggtggaactaccctgtttggggcttctcctccaggggttcacccaagtttagaaaagcagtaaaacagccaccatgcagaccagcctatccttttaacaaacgtctttgaagctaccatgttctaaaacattttcagcatgttttgaagctttttattattactatagggaacactctgaaactaatgctatggttataaggaactcggagccatccccagtatgattccatttcccaacaagttcaagaaacagaatccaggcacgtagtatatgaacaatgccaaaagatgcaaccgatacagtgaaacttcatggtgttagagacaggaaggaggttggaaattaccctctaagtttgttcttttagctcattatttacttttaaagtactgcttgtgcagaacccaaggacagctgcgcatttattgcacatttatattcactgcttcctgatgacattaaatgtaagcacctgcagcagggtattggtraactgtccaggggaagcacaaattagaaaaaatacaaaatacgcttccctgagcccatgaatttaccrtatcaggaatatgtaagatacattaattagttcatcagtaggctccaagacagacattgcagatggtggggaaggtgggggtgggggcaggtgggtgggcaggcaccactgactcaaaagttattgcgtgtgggacactttgccaaactctggggcctgtgtgggttgaggcacatatgttggggcctccatcagggctgggtggaggccagggcaggacacagtggtctggagctgaggagtacgacacacaactccacaggagcctcagagtttagcacgtgtgcagggtagcatgtttgggcaatgtgtgtctgtctgagagtcttctacagctgagagcctggggtccccaaggaaatagggtgatgtcagcagggaagagcccaaaacgctcatcagccttcaaaattcagcatacgctagggacctcatgattccaagcagagaagctaaaagaaatgcagttcaccaaggcatgtagttcaggtgccttctcccaggacctatgtagcattgagacttccctggggtcctttaaattatgcaattatcaagccttttttgaagatcttttttaaaatgatttttctttttgcattgtcttttggttttcaaggaaacataggttctttggtgaactgttttataactacagcatttgctgtaaggaggtgttcatattctcttagtgtaataacatcaagaagctgaaagaagtccgagatctctaggagggaaatggcttcagaatatgcctctcaggctaccatagatctgacaccccagaaatatttggaagacagactggagttagattccataactcaggctatgtggcctacctgctggggctcctatggccttccctacctccactccccaagttgtggcagagagccccttccaaattgtcctcggtctgattaacctcagtatgttagaagacagggggttgtcaaaggccaggatgttctttgctgtctctcattgtgctgcagttgttgaagcctggagtaccaaccgggatttcagacagcttggatgatgtcccttctggttctgcaatgggttctcttatttgatgggtagctgagaaaaagagaggcaagggggctttagatcttctggaaatcttgattcgtcagagttgattgactygtctcttccctggagtcagtgacaggcaaattcacaatttcactcaatgctygcactgaatagctaaaaaatggccagtattctgggctagaacctgatgacagaaagagatatggaaggaaaacagtgtcctaccacaaagtagcaaagacacattgccttggtgtcaacacacttatacttaaagcttggttctgccatttataatgaagtgacctactgctaattgttaacttctctgagcctcagtttgctcatccataaaaataatgcctcagtgttgcagtgaaggcttactataaagtgaccagcaggcaagctagacatagtaagtggttggtgcaaagtagctgctgttgggctgcttttcattcggtttaagtactcatctagaactgatgcgctattagatctatttgactgtcctgtgaacaaaagataaattgtttcctaggagtattttatttttctaagctaaacacttggtgcataggagcttaccacttgcatgtaattttcttgttttgtataaaataaactgaaaaaccngttctttttttggctgaatttaatcatcaaacctatttttaaaatgctctttgtgtactttctttcctttttagaaaattccttttggtatttaggaaaatgtttaattttgttctaatggttacctttgtagtactctttattacctttttaagaattttttaaccttttaccatatcttttggctattacttatagtgtaaattcaatgatcttattctacgttcttacccacttctcccattttaaaaattgtactgtttckattctgttagaaaatgcaatgtttaactaccattcttatacccatatctccaaccttgtgttagtcctagatctatatatgaaatatgtagaagcccaccttcaatcctcctgctgaagtgtctgcagtcagctcttagttgaataaagtacacttaattctgcagtggattcgtcagaaaggacacgtgggcacagtattcttgtgttctttcgtcttcaaaactgcttttctatattgttaacatttgaagaacagcttggctagatataaagttcttgacttgcattttctcaagcttctcaaagagctgcttcactcacgtcttgctttatatgttgttgttgagaaatccaatgtcagccaaatcctcttctcctttcaagctattttatgtttcctccaaaaggccatatggatttttttctttctctttaaagcttagcagttctactaggatatggctctgatataataatgccaggtcaacttttataataatgccaggtcaactttttcaagtgaaccctttcacttgtagattcaattcctgatttatttccagaaagttttcttggattataattttaaataatagttatattccattgttttgctctcctcgttcaagaactccagttggacatccttggctggtcttccacttcgatcactttcctctgaccttttttctttttttctttacctcctttttgctctcttgttttctcctgctttccttcaatgtcttttgttaaatttccatttaaatttattctcccttgggcctcataattttgtctacatttctggtatgattttgccattttctttgatattcttcctatgttcaatgactatcatttcatttcttccttttcttctttcttgatctatttgtgttgctgagttttatatttctgattcagttttatatttctgattcagttttatatttctgattcagttttatatttctgatgctttttacgtatctccaaattctattttgaggaaaattaatttttgtgggagtattatgttacagttttcctcagctcattgttccccccaccacaccctgcccctgaggtgagggagtattttcttcagctgaattaccttggttcactttttacgacagttttatttggatatgactgcggtttttctgtacctcttcattctgtggagagagttcatcgtgtgacatcagcatttcctttcagttctgcccttttctgtgaagtttcttttatggaagatgttgatggtgaagttaggaagaaaaagaaagggactactgtgtctttcttcctagaaacattaattttatcttttcttttttctttcctttcattgctatttcaccgaggaataccaccacttctctgtatctcattctccctaagaagccgtgcttctccagggctgccacttctgggcctcactcatttcaaatcttttccctgcagctggtggtgtgaactgccaagttccaaattgcgtagagcatttcttaacgtagttgggctttcttttgagagtgtgcataccttatgtaagtccttaatgccctctactatttttgataccattctttaatacttccctacttcactttccatatccataggcttgaagcagtaaggcaaaaggtagctgttagaatatgatgcatttttctacttgctgatcatttacaacttgtagtattctccaattcttagtaatgctaaagccataatgttattttctattttcactctatttattttaagggtttttaaagttgtatggggagatttgaagtcaagcagctgccatcattttccattcctgtttggtgttcattgaacttcttggattttcatgttgatatttttcatcaaatttggaaaaaaattttgactgcatattttttcaaaacttttttatctccaatctctattctttttttttctcaaatctctctctcctctttttctgggactttaattacattaatatttgaacccttaataccatttcacagataacagagactacctctctagcctttcttctcttagcttcagtttggatagtttctactattctgtcttcaagttcactgatcctttctttttcagtgtccactgtgctgctaagcccatccagtgaactttttatttgagatattttattattattatcattttcatttctctactgagagtatccatttgtttactcattaggtttatcttatttaaacctgtaaacatatgcataatggctgttttaaagtcttcgtctattaattccaacatctctgggtctgtttctattttttgttaattttttttcctggacataggtaacattttgctactacttcacatatctagtaatttctgattgtgtgctggttattgtaaattcttgaaactcccttctcttggctcctgtgacacaatgatctctgggttttcctactacttctttgggattctgtccaccttctttaacactcattatcttctacttgatttttaaatgtcatagatcttcatggctcaatcttatatttgatcttttctcacactatattttctctttaggcagtctcatctacaccctatgcttcaatcaatcaccacctacacactgatgattcaaaatcatataaattcagatgagacctcttctttgactaacttcagactaattgctacttgtttgtttcaataacacatctatctcactatgtccagaaccaatattgtgatttctctggcctgcctgcatgtgcaaacacacacacacacacccacaatatgaaataggaaacttcttctagtgatataaatttcagtgaattacaccaccatcacttcaattatgcatgtttgaaatacagacactttgacacctcttccttcctcattccccatatacattccatcttgcaattttattgattttatacttccacttgtctccattgccatctctctctgccactatccagtttttagctcccaccacctctcacttgcattatgaaatagctccaaatttattgtgcacctctaatctttccctgctataatccattctccaaatcattgccagcattacattttagaaatgcaaatctaataatgcaaatctaattcattctctctctgtatttgtctctctctctctacatgcacacacacacacatacacacacacagttttaaagaaggctaaattgttgtccattgctttttggatgaaaacaaaaatcattaacatgggctgatccctacctgactcatgttaccatgctttccttgctctctcctatccctctctgttgtcttggtcctatatactgttctggatttcctggagtgtatctgcctctggtctttgcctgtgctattccatctgtattaactgctcttttctctcctcatcacctcctccaaacctgaaatcaattgtccttttcttgggggaagccttccctgaattccttggccagtcaatctcacacttatgctcacagtggcacagtgtacctctcatttgtagtccctataacatttgtaatttcacatctatttccgtgattctttcattcaggtatgacacccctactgaattataactgtcatgaaatcaagaattgtgtctgttttggcacactcatatttctagtatcaatcatagtgtagatgtttaataaatatttactgaatcagtgaataatgaataaaaagtactcttccatgaatctttcttatactcatgcttagctctcactctacctttctaacaaatggcctaagcagaggaagatgctaaaggggctgctaaggcagcaagaaaatcaagtarcacagaaacagagtcagttggttctttgcacttaggattctcagaagaattttttgcttctgccttcaaaattaaactggaatattaaaactgatcttttggtccctggaagatgaagtacaaaccatcatcaaaaagtatctactgttgggactggtgactcactttgtccttccctcctgtaagccatgagaaggaatcagaatgattctgtcatcaagagcatcacaaatcctggatcttcacctgattaatgcttcacgtctagcacaagcactttcattttcaagggattccatactgtattgtctagcccctggctgggttgggatatagttatcttggtggcataggatcagcatgtgtaagagcgggatattattgggcgctgtattgaaaagagtaaccctgggaaggtgagggtgattattaagaccaactctgaagcgatgactggtgaccagaaatgagttgatgtcagaaatttctacagagatggtgatagcttataaaggtgaaaatccagtaaatagtctggggtttaaaaactcaagtaagggatgaatcaagggatgatgcagaaattatgtgtagtagaaaaggcagatgtcaggggtagaaatacatcaccgggcaagtaaggccaagtacgtgcccatctggaacacagggcagaatctcttcagtaagttggctttattggttttagtcatttttatctattgctgatgctcatgtgatactttgtttcttgggtgaatttcggtatctcagacagacacatacaaggagaaagaacagaagttcttaggtagttttttagtaatagaagttcttagattttttttttttttttttttttttttagtaagaaagaaaagtgctgggagagattgatcgttccttataaaaaggccttcattcctcacaaaaatacaactttcagtcaagaatttggtcctttaaaaaagaaagaggaagaaaagaaagcatgwgctctatccctcttttgactaaatactaccactgactttcctgtttakaactaaaggctgtctcttgttccacaggtcaaatgcatactttttaaaatgccacttgaccccttgggttccccattctcagtagaaaaacaaaatggtcattaatttattttgacatgcaaactcagctgaacattttttggtgattcaaccccacagatgtaaagtgaaagagtgccagaaaagcaagtgagagccatgagattaccacaagtctgtgagcacatttttttcaaggcttacagaatcccaaagcttgcccttgcttcaggaaaaagaactggttgacacctgagaggttttaagccacaagaagctgaggcccgttgtgaggagggcagggacagtggggccaggccacacgcgacgcgtcacccacctcctgcctcacctcccccactgagatgtctgctgggtgggaggaggcttattgccagagaacagtctggtgttttctgttcctgcttcaggaagtcccccttctcccgccacccccgcagctcctcagcctggaaacaacttttagagaggagaagggaagcaaagctttcaaaagcagatacctgtggggtttgaagggaggtgccccttgttcaagtatttctcccccaaaattgaaaggacacttcagattcattcattttagttttgatgtatcttcagtaattaagaagccactaagaaaactgaccctgggaaggcaaattcctgaagctgagtcagatacagccagctcttaccataccatctgaccctcagttccctctgacctcatctcttcccacctcctctctgtctgactcagcagtgaggccacacaggcctccctgctgattcgagaatggctcccacctgaggccttgggccccccttgttttcgcccccacatacccatctggcttccccttcactgcttccaaggctctcctcagagagcatcctgtcagaccagtctttcctggacatgctgagtgtacctttcccctatttcattttccttcgtggcaccttttaccacctgatatgttcaatggctctatgtttgtttgtagtaagtctcgcctgactagaatataagacccatgggagaagagactttctgctctacccttggcacataccgggtgctcaaaaaatattcaagtgctcgcttnggcagtacatgtactaaaactggaacaatacagagaacattagcacggccccttcacaaggatgacacacaaatttatgcagcattccataatttcgagaaatacaaatcaaaaccacaatgagataacatctcacaccagtcagaatggctattattaaaaagacagaaaataagagttgctggtgaggctgcagagraaaggggaaagcttatatgctcttaatggaaacacaaactagttgagccactgtggaagacagtttggagatttctcaaggaactcaaaatagaacaaccattagacccagcaatcccactactgagtatatacccaaaggaaagtaattcatcctatcttaaagacacatatgctcctatgttcactgcagcaccattcacaatagcaaggacatggaatcaacctaagagcccatcaacagtggattggagagagaaaatgaggtacaaatacaccatggaatactatgcagccataaaaaagaatgaaatcatgtcctttcgcaacatggatggaggtggaaggcattatgacctccataaatgacctaatgtaagaacctaaaacaaaatattgcatgttatcacttgtaagtggggcctaaacgttgaagacacatgatcacgaagatgggaacaataggcactggggatcactagatggggaaggaagggagcagggggcatgggctgragtgccacctgttgcgtcctatacttattccctgggtgatgggatcattgggatcccaagcctcagggtgatgcaatttacccatgtaataaacctgcatgtgtaccctttaatctatgataaaagttgaaattaaaacataaacaaataaaatcctgagtactgtttcaaaaaatatatttgaggaaagaaggaaggaaagagggatggagagatggaggaagactaaaggaaggatcgtggccctgagagaatagagcacaggccaggggtgagatacagagtgagatgggagctgaatggggtctctgaaactagacatggaagacaccaaaagaaacattcctacttcatctttccctgtgcctgggataatttactcctggatggtaaagatatgtcttggtttcatctgtgttaaataaacctgcacgatgttacaagctggcattgcttcataagcttgaccttagctttcaaataggacctygatcattgctcaatgaccaagtcacaaagttgcctaatgatattggcccacagccatgttattgcaaacatggcaatgactggccaaaaccaggtgtgctccttacatttctgcccgggtgatactctcagagagctcctcgccatgagaactaagtcastctcccagtgccaggagccaggacaattayggggctttccctattgtgtgttcttgctgctaaccagctcccaggcctaggcttctgagaaacagtgyaggcacacaagctgcagatctctcctccctttattctctctccccttccccaaacccacaatagcctctaccatagtgcttattcttttgacctgttctgatctgctagcctaactattccccarcacctttaggaagataggtcttccctgaccctcagtctgaggtctagaagcccttctgccttgcctcacaggcatcttccctcctcccccgtccccyagaccagtccaacagcagcccgtgcagcctctgaagtccactcccagtgctagctgatgggaaccccatgggctcctgtctgctatacaaatggaacagactttcttcagagccaaccccagctgccccactgaagctggttgccacagtgattttcagtctcataccagattctgatctcttctcttgcccacctttggtgctgcagagtggatcatcttgttttatactcaagtcatcattaaaatttatagaaaaagagagaatttaaaaaaaaaaacactaaaaaatcaccttgtacgcatatacctcagaagrtctttggcctaatggtaatctgtgacattaaggcaaataaccaaaaatatgtaatttttctatttatttctttgagtgggctcagttgcagatatatgaatctgaccagggtcctgatcacttcctgctcccaaagaccaccctttgagcctgtaagatccaaagtcaactcagtggattaatgtgcaagtctagcctgagccagtaagacatggttccctctaagatgccaggaaaggacctagggcttccctgggctgagctcttaggtaagccatggcctggcctggcctyttagaggttgtgcaagaccagcctctgtgatctgcgaaggccctgagtcccagacatcgtctccaacactgacctagatccagtgccagcaggacaagaaagwcccctctgctttaacctttacatgaaaagaaactttgaaatgaccaatccacattttttttgtttgtttttttctgctttccacagcccttttctgtctgtaaaaccaacctcctcttcttggctcatcagaacactcattctattttatggaataaagtgctgcccaattgtagaatcaaaaatacagcaaattaatgttttttatataaagtttttgatacataataattacacatatttatggggtatctgtgatatcttgacacagccatagaatgtgtaatgatcaaatcagggtatttaggatatccatcgccttgaacatgtatcatttctttgagctaggaacatttcaaattttctcttctggctattttgagatactcaatatgtttttgttaactatagtcaccctactttgaggctgaatactagcrcttattccgtctaactatatgtctgtacctattaaccaacctctcttcatcccacacacccttcatagcctytagtagctaccattcttttctctacctccatgagatccatctttttagctcccacatatgagtaagaatatgcaatatttgtctttcggtgcctggctgattttacttaacaaratgcccttcaattccatacatgttcctgcaaatgatagaatttcattcttttttacggcttaatagtattccattgtgtgtgtgtgtgtgtgtgtgtgtgtgtgtgtgtgkatcacatttgctttatccattcatctgttgatggacacttagattgatactgtatcttggctattgtgaatagtgctgcaataaacatgggagtgcaggtctccctttgatatattgattttttttcctttggataaatacccagcagtgggatttctggatcacatggtagttctatttttaattttttgagaaacttccatagtgttttctataatggctatactgataaatgaatttaacaaggttgcagaatacaaaatcaacatacataatcaatagcatttctatataccaataattaacttgctgaagaagaaatcaagaaagtaatcccatttaaaatagctataaaaaattaattgtctaggaataaatttaatcaaatttaataaattctttccgatgaaagaaattgaagaagacacaaacaaatagacgttccatgctcatgaattggaagaattaatattgttaaaatgaccatactacccaaagtaatctacagattcaatctcttatcaaaataccaataacattcttcacagaaatagaaaaataatcctgaagtttatatggaactacaaaacaccccaaatagccaagcaatactgagtagaaagaacaaagtggtaggcattacacaatctgacttcaaaatatactatatttggttacatatagtaaccaaaatggcatgatatttagtataaaaagacatatagaccagtgaaacagaatagagaacccagaaataaatccacgtatttatagcaaactattttcaacaaaggtgccaagaacatacactggggaaaaaatactctcttcaatatacggtgttggaaaaactggatatccatatccggaagaatgaaattggatccctatttctcaccatatacaaaaatcaacacaacatggattaaagacgtaaatgtaagatctgaaactataacactactagaggaaaacacaggagaaatgcttcaggacattgatctaggcaaagattttatggctaagacctcaaaaacacaggcagcaattaagatctttaaaccaaatttgttgtaattttgtcttatgacactagcaacacaagtgaatttagaaccatttgtctggtcacttaccgtagaattaaccaccttcaaaacatgtaacgactttaccacttaaacccttaccattttgttatggtcagggatactgtgggccaggtattcaataaggacacagtagaaatggcttgtctctgttccacaatgtcttggaccttagctggaaagaagcaaaggccaatggttacttgatggcyggragcaaatatcatctcaaggctcccttcctcacaggtctggttcctatgctaataggactcaaagacgaggataggtgactcattamctacccatggcctctatacatgggttggtgttttcacaacatggtggcctaggtattcagactcaaggctccaagaactagtgttctagaaaactaagaggaagctgcgtcactttttatgattgagcctcagaagtcaagcagtatcactttccctactctactgtttgaacaattacaagcccactcagattcaagtggactccacgtcttgatgagggggaactaaggtcacaacgtagaagagcacagacgataggagacactggccatctttggaaaatacaatttgccactcatcatgtgttaatgcacagatgaggaagtgctatctgctcttctcccctcctcagctcaccctgacttctgtgtttccagtcctgattatttataacacatgttcaatataacaaggatgttttgaagcccaaaggagtgaatcctttcctagcctttcaaaccaagataaggaaaaagtggaagaagacattaagacatgcagctctaaggaactatccaaattacactaggtagatgccctgcagatgtttaacttcaagatttccagaggccacgtgtgtgtcagtatcagagaatcaagtttacattctcaataagtagatgttgagaatatacagctgatccccactatttgaagatttttgcatttgtaaatttgcctactgactaaaatttatttgtaacccccaaatcagtattcagagtttttgcaggcatttgtaggcatgcaccaagtggcaaaatattgagttaccttatgtgcacgtcaacagacgaaggtgaacaaggcaatactctgccctcttgtttccattctcatactgtaaacaagtgaccttctgtggtcaacctagtgccttatttttcaaacttttgtggttttgttagcaatttcactctctaaaaatgaccctcaagtctagtattcctaaaaacaataaggctgtgatgtgccttacagagaaaatacatgtgttagatacaccttgctcaggcatgagttaaagtgctgttggctgtgagctcagtgctgatgaatcaacaatatatattaagtaaggcatctttaatcagaaacacacataaagtaaggttatctattgatcagttggcaaaaatgtaactagaggctcactggaacctaaacctgcatttcccttaggagcagtggttcaatatttgctaattcattgtttgcagtgactttatagagcataacttatattacaaataatgagaatcaactgtaccgtagatcaggacttttataagccctggagatacaacagtgaccaagcagaccaaaatccctgctgtcatagagtttatattctagaggagaggggaaaacataaatgaaataaataaataaaagatatgtatgttagaaggtgataagtgctatgggaaaaaataaagcaagtgatgggaggtgggagtgggcattcaaggtggccttttttgttgttgttactattgttttctgtttctttaccaaaaaaaatggccagggtggacctcaataacaatcagataacagttgagacagctggkgaaagagatgaggaagaacactaagcgatttcccggaagacagcagaaagaacaaccagtacacaggctgaggatgtaaacaaacccgccatgttgtggaaaccaggaggaggctcatgtgcccaaaatgsagtcagtaggagataaggtcagagaagtaagaaggtgtcaactcaatagggcctggcagcccattgtaatgactggggctttcacactgagtgaaagatggtaagcatccaagggagaaacaggasagcaattaaaagagtggcaaaaatctagacttggagagtaattaccaccgattataagaagtggtcaggttccagatgtcttcaaaggcagagccaacaggatttgccggtggattgcacgtgtaattgtgaaagaaatgatgatgtcaaacatgactccaaagtttttggcctgagaagctggaagttgccattctaagacagaaaagactgtagatcaagcaggttctggaggggatttcaattctactcattttaaggtgagatgtctacttaatatccaagtggaaaaataaggtaggcaactggatatacagggctggaattcaaagaagtccaaactggtaatatacattttgagtcctcagcataaagatggaatttagagacatgtaactgaatgagaccaccaaggaatcggtgtaggaagagaagaggttgaagaatggaatcctgaggcattccagtgtcaaaagaagaaattgagaaaagcagattgagaaatgtggcctcctggaagctggatgaagagagtcttcctagaaagagtgaatgattgttatgtcagcatgcccagaagtggggtaggatgaggactgggaagagagaaagtcctgatttgtagagtttgccaatttccatggcgaaaatactcccaccagagttgatttcaagctgttaatgtgatgtcattgaatgcagagtttagaagagatgcacacaattggctctcaggagatattgcaaactgatctcagcagacattgcaagctgatctcagcacacccctgacagctaatgatatccattgcctcagcaggctttggcatccaagagggaactaactgcccaagcaagtctgaacgtggcatggctgaatctctgtcatctggacagggccaagcaacatttatcttcaatatggtaggctggcaactttctcagagggcagcccaagctgggctgggcaagaggggctcagaaaaggatgtcatggtccttgcagccagactcatgctaacttttagcagagtgcatttcagtaatgaacagcctgagggatggtccctcagccaacacagaatgcagacctctttgcaggcttcccagatcttcctgagcacatctttggtgtctgattcaacaatgagagggtctgactagacagatttaagtctcagatggacttaccgagcaagtacactaaagtaatctggacactttaacaaataaaagcataatactctctctcaaagagttgttaaaacaaaatctgatgagaaaccttcttggaaataagtctcccggcttatgggaaccttgtttccaaatctgttagtattcccgcccacatcctgagaatccttttatgttctctcagactccagaccctacttcatacatttcctgctgcctagactttatcttgactggcctgattactgataccatttggttccagccacttaattcccagcagcctgaaatggccacatccctaaagcaaaataccatcggactaggaggaacatcaacctgcttaaattgtgggctctgcctttcatttacacacaggaagaattttccaaggaggtttttttttcccttccctctctggaagtctttaaatgtgagattttcatttttcataaaataataattaacaaacatacatcgattacctactgaatgcagcgcaccatacaggattctataaaacatacaaagaataattagatgtctacttataatgtagttgggaaatttgtcattttcttagataaaattctgaccaatgtgagtgcccagtgaatgtctcagaaaccaggtactggaggacagtgagacacaagaagcccacaaagctgcagtctacaggatggataagatcaaaggaaaggaaaaggaatctcctatttgcttgccacttctttgtgctagaactgttttagacactacatctgtttaattacatcgcaatacttcctattgctataaaaaaggattttcctacttctatgaaaagagagtgtcattcctttttacaaatgaatcacagagtggtaaagcacttaaccaaaatccacagagccagtcagtggcagaagtgggaccccaacagaggaaaacatctccaaagtcctatgtttaactcttactaccacttcacattgcttcccttagactgaggagtcagtcgaattgtgccgcccctcttcccaaagatacgtccgagtcctaaatccctgtatctgtaatgggatcttatctggaaatagtatttacagatgtaattaaagtgtcttgagatgagattatcctggaggtaggggctggactgaggagccaaatccaatgactggcatctttagaagagaagggaaaacagacccagagacccagagggagggccatgtgaagatgaaggcagacgtkggagttctgcacccccaagcccaaaacaccaaagactgccagcaccccgcagaagtctggagaagggcgtggaatgaattctccttcaagccttcagaatgaaccaaccctgccaacaccttgatttttagacttttgaccttctcaactgtgagagaataaatttctgttgctttaagccaccaagttgttgtgatttattatggctgccctaggaaactaatacggacagtcaggatgaggtcagtctgcacagagacatgggggaagaaagagaagaaaagatcacgaaatgtgacttctaaagctgagccaaaatagggttcctgggaagagggagctatactctttttgctgccagtggcaagtcctgaactcccatgtcttggtttgattccaactagcgtgtcataaactattcggtttgactctgaatgctaacatctaatcagtttcctcagcttgctggttttgctggtttctattgtttgggcaagtttgagctacacagacacagctcctggtatacttgtcctcaaatatcagagaacatcgaatcattcaggtgcatctttgtgagcacactgaagagataagcttctaagaaataaaactgatatcactggcaatgcctaccattggtcaaaagtaacttcctcaatagctcttggtggtgcctagttctgtttttacatggaggcatcagataaaatgcaatgattccaataggattcagctatcatcacccattaacaggtcagttctragggaagcagctctctggggatttattgtggaatgagagaggagagaaaactttatagccaaagcaaaacgcaaagagatagatctatttgagaatcctgggcattcaggaatgttagcaaggaattgaggaacagactgaaatgaagatgacaaggaatgagaataaatcatggttatgtccaattttttgtatgttggtgttcaagaaccataagtagccacttactgaattctgattcgagcttactaaggacctactaaggacaatgtaccccattaggtgggtgtactagagctataaggatgaatgagttcatctgctcatagcataaggaggcaaactttgggggttgggggaggtatatgttgggagtcagagtagaggaaagaaaaatgatgccatatccctcagcttctgggaggtgatcccatcaagagtgcagtggaatttttaatgttgagaactccatgaagttctgtaaccaagtaccccccattgtttctgagatagagaatgaattattttttattttctcttctctctttccccctactcccctgttccccacttcctatttagctctttagaaatgcaatgatgataatattttaccttccctccaccagacatccctacagggcaagcttatctgactatgtgcttacttaaaagctccaggacagaactctgtcctaccaggagatttcctcaaaagacaacagtcaatacgcaacctaaagtacgcccactatgaaaccctctcccacctggaaagtatctcgagacaaggccactttacaacctagttctgcccgggatggtgccagctcgaccacctggtagataaggcacaaatcgagtcatgcagacccccacctgctcacgccctcccttgcatgccattcatgccaagtccccttttaaaagtttctgctttctgctccaaaagcaaagtggtacccataaggcaggcagcctgtacttccctaagctagctttggaatacaaaatcacattccttataccagactccgctcttgttcattggactaagcaggtggcaagtgactaaacctgtattttggttacatttctactgagaggaatccagggacaccaataacaggctgagagttgtctggctgctcagagctccacacaaaggtcgggtatttgtcagaggaggaaaagtgtggcatctttatatagaccagggctcaccggcatatactttgccatttcctgggaaaggaagcttctggctcctggaaaaatggcagamacttgaacagaggattggtgaagtcttttggtttatgtggccagatagtacaaggttcctatcaggaagaaaagcacatagtgtctttcttcactcctttgggtttgggaaacaaaaaaaatacaccaaaggcagtgaggccaccataaaacccagagtgggggcagaggacaggatgctggggagttcaggggaagggctcttctgaggtctgagtttccctgtatctgcgcatttatcccaactgaacttttccacgggagtgcttctggcctcctctcagcctaacctccccacctctccacatcctgagcaaaggttccatgtgaatgagcccagatggaaaaacactggaggagtttttctttgtcactacaggcaggaagaaaatggcaaatggagacaattatttgctgaatttggtctccgtagactcatactttttgcttagttttcattatttgaggataaarattgcttttaggcctaagagactcagctaactggacaatttttcagttcatttttgagaagtaggcatggccttgggagaacattttttaccctctccgcactctcattccatctcacatacaaatacatyaagaaaatgaagccaactgaagcagaggtcaggagtgaaagaaaagttgatataagagcttcagcaacagcagctggccccaggcactagcggctgataaaggaaactctgggcagaagagcctgagatgaatgggatattagtgagaggagctgagccggtcacatagccaagttttgcaggaggraaaaagagaatgggaaattaattataatcaattcctactaaaaccctgagaattggagacaacacataggctattgagagggcgatttctcctaattctttctgcaaggtctwagagtgcttctwacccacaacagaaggtacgagaacctctgccaagcatatggaattgccaacttcaagtcaggagaacttacttgtgagcctcctggagatggttatgtggacacagatgatgggttttctttctgtttagtaaggagttcagtaaggagtaaacctatgtttgtttggttctcatactcgtctctactccctgctgatatttcccttggcagaaaatgagtgcactgaccaagccaaatgcaagcaataaatccggtggcactttatatcgtattaactccagagaggagttagaaggcctcaagacaatcatgcctatcgtgatattggaggttcgctgtttggagggcagaccaaaacctggaggggtctagatatgaggatcagaggctgagaaagggtattggggtagggagtgactccaactttgctttcagccacccttctcagaggacagtgggcagaccagcaaaaccattctggagggaaagccaaaaaaattagggttccaggaaggctgaaaatgaaggcggccttttctaataaagtgaacaggatcaagaggctgccaaatgctgctcactccaaccccttttattggcagtgaagcaagtcaaatacttactaggaacactagccctttcttagaagcgactcttgttgaaaaaaacatcctgtgctttgygaagtgatttgtccctgaagaactctatgagtaaaagagactctagctgtgactttggccaagtcaggtggtcttgctactgatgagggggctgaatcctgagcattctctttgatacggaaaataaaacggactaggggagaaggtatagaatgtaacgcactaggggttttttggagggaggataatctctgggmagttccctactcttgaaacctagcctggaatgggctttcacctctgtgctatttatactaaaactgaattggccttagggatgggatggaaagtaattaggattccctattacctgatgattttgaacccaaactattcccttgtggacacaaatgggtatggtggagtcaaatgcattccgtgaattcttcccctattgttttaatcaaagcaccgattttagcacagactcatgtgccaaacaaactattgaaaaactactgtgatacacatttaatgagatgatctaaagtgtttctgggggcttgtcatgggactgctgaggtggtctccagggatgcttagaggaaggatatgggaagtgagacatgtgggttgaattgccccactcctaataaggctgataaattgaaaaaccaaggtatagaagtgaccttttacgttctggggcaacttttcatctgtgcttaacgagagaaatgaaaatcggatggatttccactgaaaatttcatgtcacgatttcatgtgaatgatctaatatctagctttccccaggagccagtgaattatatatccagctgtggaaactgaaaacaccatgaggctgctcatgttaggcacctgctgtagagaaagacctttcgcatttgggaggaggggcagaaggcttgtttgtaaaacagcctggtgtgatgctcttttctgagcatttttctcttgctctctctgccttgcctgagttgtctcttctcagtgactttaggagacatacctttgggctatcttcataaatcttttgctatgaatcaggatttaaatcattagggttttcactcatgccatttaggatactgaaaacaagtgtgcacttttcagacattctgtcttacacctgtaggtcacaagtctttcatgcctatggtattttgttacagtctatatggtttactgttgcatctctcaatccattgaagtctattccctaaaaacttctaggcatggagtaaatgtcaattacaaatgaccagaatttaacaacaaaaaatttctaggcaggaatgttacagcccatcttcagttctggaggaaagctgggatagttcataaaataattctgtctgatttgtttctatgagaatctgtgtttagggtattttcaggagagaggaatacacttacttgctctaaggccacacatcttaaaccgagatacatctactctgggaggtttgcagctggagttttcagctraacttttaaaaactttgtttaaaataagttgctttacattggaacttaatatcctcagtggattgagatcgacattctgggaattgaaattgtgtctggagaagagaaaggagcaatgttgcattttgcagtagaggcagatgggctaggcagggatgggggaagtcttctgaaaggaaagcagtgaacagttggggaggggttcagaaatggagctaggggaccaaccacagaaagggtggcctactttgggatttttctagctgcagcataaatctagtacatctttttatattgaaactaaatacagatatgaaatagagcttcatctggcaatggcctcatgagtgttgggcaaagctgccttcttctgaggctgtttccttcaggcacgggcttgggctcctcttctcattccctcaagccccactctctcaactcaggtgcctttgtcagcttgacataagatcctttaataaacctaatggcaaacatcaacgggaagcaaaaaatccagatctcaactatggcatgaatagttgcaaaagatctaactaaagccacccagccacagtgtggcttcctttctgcacaagtattcttgcttcctaaaaaaggaccaacctggctgggaacgctggctcacgcctgtaataccagcactttgggagcctgacgtgggtgaatcacgaggtatggagttcaagaccagcctggtcaagatgtgaaamcccgtctctactaaaactacaaaaatgagccaggtatggtggcgggcacccgtaatctcagctactcgggaggctgaggcagggaattgcttgaacccgggaggcggagcttgcagtgagccgagatcgcgccactgcactccaacctgggagacacagcgagactccgtctcaaaaaaaaaaaaaaaaaaaaaaaaaaaaaaaaaggaccatcctataccccattctcagcacgtcattcaggtactggacagaccttagtcttaaaaccagcatgcctggagtgggctcttaccctctatgggcctcagctatggggggaagaaaagaaaaaaaaaaaaaaagcgttaaactagggactcaccaagggcccttccagctctagctctcttcaattctacatacagcattaaagaatttcaggatatatctccctggcttgttgttagtctctttttactttctccaactttccctaaagcagggaatagcaaagaatagcaaagaaacttggtgctgatctgcagagagagcctctcctcaatcagagattctgagccaaggggtttgtgtgacctttggaactcaaccacaaagccctggaagaactggttaccaccaggaccctagagaacaatcccaatataagccacactttctcttgttgttctcctatctccatttttgaacctctccccaaccttttactgccttgccatctaagtctactgtaaaaatacaacatttctcctttctcctctctgtcccaggcaaaatttctattcctaggatgttgatctcaatctgctaagaatattatgttctaatgtaaagcaactctttttaaacacagagctcaactcaaaacaatcttcagtgatctaccaaaaaggaagatattttgaataagagacttccttcagatgaaatcagtataattaattcaaatcccatccatcctctctttatataatcaaacttcacagcaggacagagataatatgggttagccaagaagagaaaagttttcagtcctagaagaaagaaggtctctgctatcacctcataatagctttggggctactccctccaagatcatagagctygtcagcataaatcatagaggagctgtttgcatgcagcagagggacccagagtgccacctggcatggtccaacctaagaacctaggtgagaagcatgggaagccaggggttgccatgagaataaaggtaaagagacacagtttgtctaattcttgggtttgcttggggtcagctctgcgtgtcgaaatacccccttccaccaattttctaggcttggcttgactccacttacactcccgtagatttcagctatcatccctgcttccctcttgggagttttttttttcctcttgggagtgttatttaggctggggagaacttaatgcagtcatcatgttgattcattttcacaaatacttattaaatgtctgcttttgcacagctctgtggaagggccagagtggtatataatgcatgatctctgacttaaaggaacttgaaagtaacctgtgccctaactttgttaccgacagggaatgattttggaggttctgggagaagcaatctgttaggttggtgcaaatgcaattgctgtttttgtcattaaaagtaatggcaaaaactgcaattacatttgcacaaacctgacactcctgacacctgagagccaactgccaatcattccaggatacactgtgtgcactttgctttctcactgcaatcttctttaagcattcatctatctctcaatttccatctaattgaaactgtggcagcagcattagcagctggtggtggtggaagacctcctgattccagaaatttcccagggtggccccctacagtttggatctgctgaggagcatgtggaaattcaaaggcatgctctcttatggagaacagtttgttggcaaaacattgcccgtttgctgcacatctgtaaactgaagtagacctgtctttctcgacacattaaaaactggtcaaaagcttcactggctaattaggttagtgatatggtttagctgtgtccccacccaaatttcatcttgaactgtagcccccataatccccacatgtcatgggagggacccagtgggaggtaactgaatcacagtggcaggtttttcccgtgctgttgccatgacagtgaataagtctcaccagatctgagggctttataaagggcagttcctctgcatatgccctcttgcctatcgccatgtaagacatggctttgctcctcctttgccttctgccatgattatgaggcctccccagccatgtcgaaatgtgaatctgttaaacttctttttctttataaatcacccagtctcgggtatttcttcacagccgtaggaaaatggactaatacaattagttgcaaaattaggttaatcaccttctcattgaatgtaacttcatcacatatatataaatgatatatagtgtacttcatataaaaatgatttgttatatatacatacacacayatatatatatataatggttwgtgtaccttccctgagaatgtgggcaactggagaactctggccatgggtgcaaaagggcctcccttgctgttccatgatggtgctccctcaggcccctcttcatctctcctctccagcccctcaccctctgcctgggctcaggccctcatcttctttttcttagattacctattccaacagcctccaagcctgtctgctgcaaatccagtctgtttacaacttacatctgaccatgtttctcccctgcctcagagctccctgagactccccattccccagaagagaacatctgagaagccttacaaagtgctgtctgcctcttcaatatcacttctgccaacctgctgccttgcagatgggcaagaagtccctcacacaccccaagctgttgctcagctttgtggctttgcaactgctgtcaccttttgccctctgcctatgcttcatttggttaaccctactcatccgtgaaggctcggccaggggacttccctggctgattgctcccaaaatatgctgtgatggatagcaccatcagtgygcttccatgaggtatcgtaactaactgtgcaatggttctctcctcaccgaggactgtgagatcctagagaacagggaatgggtattagtcatcacatccccaacattaaggacagtgattttgccccccaggggatatctggccatgtctggagactttttggttgtcataactagatgggggtactactaataccaactaagtggaggccagggatgctgttcaacagcctccaatgcacaggacagcctgcataaccaaaagttatctggccccaaaccgtcaatagaaatcttaatctaggacaaagactacaaacttaacgctgcttaatgaatgataaagtgaatatattttactgaatgaaactctgcccttaagtaaggtccacgtgacaattgttggatcatgggaaagaattcaagtaaatgtactccttctttagaacaagtaatggcataagcctagtcttttattgtggatttaagtttggctccagttaacaaggtatttcacgttatcaactgagcaactaggaataatataccgaaggctattctctacatagagtaagaatttctagactaaaataaagtcagaatgtcagaaataaaacaggtgttaaaaatcatccaactygagctactgattttataaatgaacactccaggtcctgcatgataaagtgactccccaaggtcacctagctaggagtgacagggcctggggccagtgaaaagagagcttgtgttatgacttcaccagaaatgaatatgagactactgggtccatctctgggatcctaacagagattaggtcagggctgggggtttgggagaggagaagagagaaatagagatagctgggaggtaggctttgttacatgtcttggtttctttcctgaacagtcggacctttcctcacatctcatggctactgaatttgaggactgcctagtgccaaagtctgtaccttgataccttagatcacacacaattcaaacttttccaccttctggggtctctcactggcaacactattaaaattttgggcaagacgattcttgtttgcaggactgactctttggaatacctggcctttgctcactaaatatctgtggcatctccaggcatgattattagaaaacaagcgaggatattttcaaatgccacctaggagggtggtactgcctcattttcctgtcccttcaattgaggatcaccaaagaccagttggcagggttgcatttgtgttgagcaaactgcatcttggtcagcacaagaaagcaatcagaatgatggatgagaatggtcttaatgaccaccttcaccaaaatgacctgtgttgtctgttaaaaataaaattctcaggccccactctcagggagtaggatgcaagaatatacatttttaatagtctcgccaggtgattctcatgcacactaaaagtttagaacctctgccttagcagtagcactcaaccctggctcatatgagaattaatgtttaaaaatgccattgttcaagccctactgtcagagatcctcagtttcaactacagtgaagccctagccttgcatgttttaaaacctgcctaggtaattctaatattcatctaaagctaagaaacactaccattatgaaatcttgctagttaagaggaaaccacaaattaatcccctcactttcgggttaaatgcaagaaacttaatgttttcaaccttggctgcacccttagtgagatttctaaaatcgcagtgccacaccccatgccattgatatcagaatcttctgaactaggacccagcttcagtgttttttaaagctcccagttgactctaatgtgcagccaagcttgagaaccatggattcagaatattttcctaaattctcccataaacctctgctcttggcttttagctttcctcctatcccctagttcaaaagtttgaggttgtgggggtcagggcaagaataataaagggagaaaggacaagattcaatccaatccagttcttttctccacttaatccctggctaccactgactyggcactctgggagtaaagagcagtggagaaagctctagacctattggtgtatatttccaagaggaagatccttggaccagcatcaagttggctttttatcttgattcttccctgaggtttctaaatattgttccagcataggaatttcagcttttattcttttccaacttttcatttatatggcatgcatgggtcacagaagcaatggaaakttggaaaccattgccttctaattagcagatgtctcagtggctaacattatttgccagtagcagtgccagcgcagcrctgggaaagttaattactgtcgacagtcctcgagcctgttttcataactggtaatgactgttaatatgtcaccactgaagttagagaytcagaaaagtcttttgtcctaggactattaaatgtcatggaagaataacccccaaatttgcctttgggtagataaagttcaatgggactggctgggygcggtggctcacgtctgtaatctcagcactttgggaggccaaggtgggtgggtcacgaggtcaggagttcaagaccagcatggtgaaaccccagctctactaaaaatacaaaaaaattagcggggcacgggggcgcatgtctgtaatcccacctacttgggaggctgaggcaggagaatcgcttgaacccaggaggcagaggttgcagtgagccaagatcgtgccgttgcactccagcctgggcaacagaacaagactccaactcaacaacaacaataaaaaagttcamtgtgacctttttaaaagaaatgttaaatctgaccccagttgctaaaggcagaagaataacacgagatttgagaccaagccagttcctgtttgactattttgaccccatttatagwcatgtcaaatgtcccccatttctgctggctccagccccatcttgttgctgcttccttgagatgtgaggaacaatcattctttcttctgttctaggccaggtcccagatgctgacaataaaactgtctaagtctggagtgttatggctcctagtgttaggttctttcaacacacaccacacacacatgttttatgtaaggtgcatcatttgcaatgggctggtggaccctgatatcgagttgggggtcaccagtacatgttccccttccctaatggtyagtagtcctgccctgccacatggccttagttaggaccagatttgaccatcagatagttaaataaatcagaactgcaaatccatcaagatcctttctccttatgtgagcttatgtctgcaaatagatatgtggtgaggatggggggaagaacacagcctgacaacatacaacaatagcatccatgcctcaaatcaaaaatgccctccagtgggtggatacttgcctgaaaactgcaagccccaaaagaaccactcaaatagttctacccagatttccagacatttcccaagtgaaacagcctcttagaacttaaaatgggaacgtcagagacattaatatctcattcctaccacctaccgcttaatcagtgtgttgctaagccccttacatatgaaatcttwctcagtcttcacacaacccacagagggggacaagatatcaccatccgtacttaacagaggaagaaatgcgctgaagwttacacaattaggacgtgtraggatatgattcagggtgtgtstggattcagaactgcacactgcacctgctgtgctttattgcattagctgctgctgctgctctgacctgggctgacgttgcagtgagtctggagaaaccctttgccatgtttctgtgttttcatcacagtttctgtcactactttcttgaccttatcactcttacagtcctggtcctattctgtctgtgatgggagagacctttgccaaccagcctctctgctcattaattagatctcaaacatggtgtctttgtgttctagtctttctatggtgcccttgtattatgaacataaaagttaagcttccagatctctcacaggtaccccattttctcctccctgtgcttctctgaacttgtttccctaaccacaaacagaacaagttctctagaggttgagtcagaagaatttttgtggtaaagargacattgaaagggggtwggtctactaaatgtcttgtgttagggttctccagagaaacagagaaatatatatatatttctatatatatgtatatatattttttatatgtgtgtgtatatatatatgtgtgtgtgtgtatatatatatatatatggagattgttatgtgaattaactcatgcaattacagaagccaagaagtcccacaatatgccactgcaagctggagacccaggataggtgtcattcmgttagagtcctaaggcctgagaactgtcatgggaagactttggattcagccatgactcaagtgtaccagtggacttttcagttacatgagaaaatgcattgtctttctctttaagcagttgggttcattttctgtcacttggaggtgaaggttcctaaagactacagcattcttcccatggatcattggatggcctcatgcaaaagtgttgcccggacactgtgtgggacagatgaacccaaaagcatttcttccctaatatgcaccccaacacccagaatctcatctatgcatgagaaacagctttgtaaatagtaaactaggtgtcaacataaagtcacattcctataactcagtgtgaattgaccttcttgatatgagagctgagtgaagacagagaatgtatgaggctttgggtacaggttcctgaggcgtgctcaaatgtacgttaagagaaaagactggaatagggaawgagagaaggaattgatggatgttaaaatgaacatattaattttgcctgtgggcatgtttccattaattggcttttggatctgaaccaagaatagcagaattgaaaacctaataaaaaccaaacccatgaagagaagaaaaattttcataatagcccaagtgagagtaatgacgtgagctaatccaatttgaagtataaacaaagaaatttcttcacgcaaagagactgacttattttgtttcagaactaaataccacgmagtagaggttaggtcagggaatctggcctaaatatatgggggggtcagggagatggaggttagtcattccattggaggacagaagaaaaagkaacaagaagttcttttatagtgactgaccataaagttttgaaaaaagaggtattcaaatagcactttaatccacactgcatgttatgagaggctatggggagatgtacaatttaaaagctcactaaaaaatggcaaattaaatttcattttctacttacggttgatagacgtgacttttcaaggtcaggcatattaattggctttcagatattaagcactgtagaaagaggggacatatttaaactttcctttaaaatagtggtttccatcatttttcatgttattatacacaaagaaagtgacaattttacggcactacggtaaatagactaggtcatttgaggcagagattgctggcctgggccaccccaggtccacctaggctccccaaagactgaggaatacctattttgyatacaagtgagctgcatccactagttaagaagccaaatcaaagactgtctatgaggcaaaacatatactgcagccatttgggggaaagaacaaagcactgaactagagggcaaagaccaacattttggttctagstctgccaagtgtaggacattggactaggcacttaactkcagtaagcctcagtctgcttgtgtacaaaacagagtaaaagatttcttgcatttcctactttacaaggtcaacatgaggatcaagaataccatgttcataaacatcatgtacaaccatagagtcctatagaaatgtgtggcctgatgatgacaatgagtatgacatttttcttcctagtcctacctccatttagaccacccttcctttcaagagtcccctgcaatggacaggagttgacaccaaggagaacaatacagctgctaaatctcaagtggctaggagcacagagtgtgggaagctattctgcagctgtgtttttgagttgggccaaagagctagtggggttttggcttcccaagtacctttgttgaaactccctggggaattttgctttatgaaatttccagcaattggagatcccactgggttggtgaatagaagcctaaagggctccctgttggatgaaaaaatgtgtttgaagtctgctgggaagagctgtaggagggagctgagggttcttccatgactcctactgtgcattgacagaagctgtccctaccactgttgattgccaattatttttgtctccagagccaaagaaaatatatttgaatttgacccatctttcactaggatctacagatggtgaaatattaatgaacaggtgggttgcacaatattccaagattgcgttagaattgatttttrtaggctaaattattaacaccagagttgctgacatatattctcatatgattagcaaacccagaagccttaatatcaacacagaatacattcagaaccatcaaacacaacatctactttgctgggaacagaatactaggtaaaggaattgagatctcacacaacactcctctgaaaatagggacagctaattttgtaatggattgccagcaaaagctgtgacaatgcctactctggaagtctctaaatttcttttcaayctgagaagggtgttccatgatatttactggagtaagaagtgatggaggaggtagaatagttctggaagtcaggtctctaaatagaacaaatcttgggatcctccaagtttcagtctatgcatggaattatgtttaaagaggcaatatctagtagctaaataatagctaaaattgttccaatcatgacttgcacctctcaaagatcattattcaagtaatgcttctatcctttcctccagctcagtgtttcctgaacttcccctgcactgatgctcttgcttacctaagcctcttcttcagcctcttctccatccctggacaattcaatgcactgcatggaccttgcttagattctgatttgagcaaaccaacttttcttcttctccttctccttctccttcctcctgcctccttccttcttctttcagatagcatctctctctgttgcccaggctgaatggagtggtgcaatgacaactcactgcagcctcaacctcctgggctcaagtgattctcccacgtcaacctcccccagtagcttgtactacaggcactcaacaccgtgcctggctaatttttgtattttttgtagagacggagtttcaccatgttgcctgggctggtctcaaacttctgagctcaaaagtgatctgcctgcctcggcctcccaaagtgctgggattacaggcatgagccaccacacctggcctcaaaccatcgtcaatgcaacactttgaagacaatgagggaaatctgaatttggatagtgtattagatgataccaataacatattattagttttgataggtgtgattaatggtattgtgtttatgtaagaaaacaccactatttttagcaatcaacacttagatacagaaagctaaaatgacacarttctgggattcggttatcatacatcagccaaaataaaggaggaaggaaggaaaaatgtacagaagtaaaagtaggaaaatactgataattctggaatttaagtgattgatgtttgaagtccagtactatattctctatttttgtgtatggttgaaatttttcctatttcctgggaaaattttccttgaaaaactttttaaagaattttaaaacttcttttcaaaagagaaaaagaaggactggggtggtggatcatgcctgtaatcccaacactttgggaggccaaggcaggcagatcacttgaggccaggagttcgagaccagcctggmcaacatggtgaaaccccatctctattaaaaatgcaaaaattatccaggcaagtttccacacacctgaagtcccagagaatctcttgaacccaggagccggaggttgcaatgagctgagatggcgccactgcactccagcctgggtgacagagcgagaacttgtctcaaaaaaaaaaaaaaaaaaaagggagaaagagaaaagcaaatgcaaatatcttcaaacgtcataagaaaaggcaaaagtgaatccgataaatatattttaaaacaataataaaagaggcattttgytgacagataaattcatgaaacaagactgacttttttgaatgccattcatagaactgccaggtcagctgtgtagtgtgaggtatatttcaatgcaaaatactgaaattataaaaacaggattatgcacacaaatgtttcaagcctttataatttttttaagtccaaatggcataggtccatttataaaatattttctgaatttatattatgatttmaactagcaatatcctattaattaacttatttaaaattcataaggagacaagttatttaaaaaaaaaaacactcttgaactgagtaaaaaatagcacgaagtgaggttcagctctggggagaagggaagttgtgctaaaacttttcaaaatggaatttaacctcagacttttaaagcatcactttctttaaggattcacggctttcctcccacactgtctggtctggggccagtgtctggagtaaagtattgctactcctaaatgagattttagaaagtagcatagtttctgaaaggagcagccactggaaaccaaaaactttctcagggtactcaaacggtttgaagagaactgatayttgaaaacggaaatccttccatttgtgacaacatggacaaacctggagaacattatgctaagtgagataaaccagtcacagcaagacaaatactgcctgatcttttgtatatgtggaatctaaaatagttamtctcctagaagcagagagtagaatggtggttgtcagggctggggtatacaggaaatgaggagatgttggtcaaagggtacaaagcttcagccatgcaagaggagttagttctggagacctaatatacagcatagtaacgacagttaacaataccgtattgtagacttgaaatttgctacargggtagatcttaagtgttctcaccacaaaagaaaagaggcagctatgtgaggtgatgggtaagtcaactagtttgattgtggtgatcattttccaatgtatacatatatcaaaacatcaagtcatataccttaaatacatgcaatttctatttgtcagttatgccccaataaagctgaaatttttttttttaaatgagaactgatgtttgcatccagttgctgctaaaggcacaaattttctttaaaaactattgaatgattttccagctcttacagacatactgggaagaaaaaagttaaaaactatttgagaaatttggattgaactacctcatcctgtatgaggtaaggccaatgtgcaatcttgcattgctaatcactcaagcagagtgctcagaagctgggaaacaggctgcggttaagaacattgcttaaggaagaataattagatcctttccgtgtctcatagccacaatttttttccagctttggctgttgtttgagcaagaccttgtgtatcaaacattgatctagccaagtggcttagtggagaatttgctcaaattggttttttagtatcttgttggcaggaggggaaatgactgcttgaacgtttcagccttaatgctgacatgtggtgacttgaagccaggtgaatgaaggttcctccagctagagaggtaagatgaacatgcmggaccaggaagaaagcaggtcatcatgttagacaggtgcaattatgtgcagagactataaaagaagagaaaaagacatttagtcatcagagagcagccattcaagtaagaccttgaaggaaagggagggtgaatcaaacagaaaatataatgtaagcaaacgcacagaggctatactgtggagaggatgtggggaagagggaagtggtccatttgactggaacagagggtaaatttaaggcagtaggaggtcataagacttatggaaaatttggaatgccaaaatgggactgttatgtgttaggttgatactgggtgggggcactgaggatttttaaaacgtgatcagggctgccttgttgaaggtaaacctagcggtggtaagtcaaatgaaawggagtcatgagagaacaggtggtactaatcactaccagtactgagtgctttgcagatgctacttcatatacataatctgatttaattctgatagcaagaaccgttattagcccactttacagatgataaaattgaggcttagggtgattaaacaacttgctcaaattcacacagctaaagcagaagaggcagtgttttaatctagacacaggtacctgcccttaatcactatgcttgacagcttcttaagctagaatgggtggtaggtgacyggggtctgaattaggaatttggaggtagtaatggaaaagagggatcaaattcttagaggtaggataggcaagacttcaccaacaggagcctacggaggtctgtgatttggtggctgcgtgaaaaagaagaatgatactgttactaacctaaataaagaaaccagaagaaagacttggcatcgattaaaagattattaatatggttttagttatattgactttgaaatgccatgagtagatccagtgaaaatgtccatccagccatcggaaatgtagtttggttgctaaagaggggagatggagctagaaagagaagctgaggcatcacgtgcaagcaatagaggggcaaatacgcaagggagggtggcagaagaaaatcatcccaggtgtttcttttcttcttactcagctcggaatagagatgacttctgagtttttatctactcccattcaggaatgaaatggagaaatgtaggtcaaaattttacaaaatggtcatgtagaataattctctgacttcccatctctgggaggaagagaggcagctttagtagaagtgtgaagattctaagcaaaatttaagtaaaattattaatttttttagagatggagtcttgctatgttccccgggctgaattcaaactctgggctcatgagatcctctcacctcagccaagtatctggaactgcaggtgtgcctcaccactcctggctgtctaactaaaattatgaagggcaacccattatctctttactttctcttgccccagaataagacaagaatgccgaggcctggtcagtatcccagggtaccaccgccagtgctggccagagcaggctctgagaggctaacrcaggccacagagcctagggccttgttttggagggtgaggtgaggcttaaagctggtaggataggcgccctctgagattcgccatctgagaagtcagtcagttctttattaaaccattctaaacaacagaaagtgcagtgggtgggcaagattccactgctgaattcttcagcaggccctgcaaatgaatgacatggtgtcaatgggagggaaagtgaagcaataaacacagatggtgtttgtgcaatctcatctgggtcaaggaaatcacctcatcactcttctttgatgggcagattcctatctcttagtttaccattttccttactaattccctcagctccatccaatgtgcattcttgtgtcaaattgcatgttcatgagtatattacatgttcctgttgtgagtatgcaggggttaccatgggatgacccctgtgctatgaacttggaacctcaagaaattagattgccttttaagaatgaatcagagaagaaatacaggaaaccactttaaataacaaatgtgttcctaggatagcaagatttgactggaccctgactgacgagattactatacctaaagaaagaacgcattcgtgagaaggagagttctgctcagttatgaacaaagcaactgcattcaataaatatttgttgagtacctactgtgttccagcagagagctcrcattctagctggggagacagaaaacaaataagtgcatttataattggatgtctgcttgtgatatgtgtgtatcccaggcagagggtccacagaacaaacarcagcatctagtgtggctcggagatgtgctcactcaagttctatgccagatttgagaagcctgcttgactctaacatcccaaatctgcatttccagcacttgggtgacattttgacctacctaatagctctcgggttgatttctcctgtgtgactttcatgaagacatacatagaggaaaaaaagcacatatcaaaagtactcaggtcaatgaattttccaaagtgagcacacctatgtagccagcaccccaaatccctccttatagccccttttaccacccytaccactgaaatgtaaccactatccygagaccagcaccataggtttgttttgcctttttctgaactttatatagatggaaatatacagttcatactcaatacatgctgcatagattctttgattcaatattacatctgtgggatatattcatgttgttgtttgtattggtgttttgttcttttttcattgtcagatttcatggtatcactacatcacagtgtattttatttaaatggacatcagggttatttccactatgccactattcttttaacaaactatttttctgcaggaatctgttagaagtggcttctgatgtttgcaactaagaatcctgcctgatccacatttgttttaattctaaatttgtattgggttacctaggttttgtattgattaagaaatcaagtgaaaatttcggggtttttgtagaaattcttctttttaaactacgcttttgaagacatagacatatttttcatgagctatttgccaacgaagatctgcttactctgtttcaacagtgaagcctaatgataaaaaataacattccatgtagataaaagctgtgacttcccagcttaaatacagcactttctggaactacagctataacttgtgttctcttaggttgctaaacaagttggttaggagcttttctcctcagggttcaaccacatgactgcttctgggcagttcgagtggttttcatcctcattgcacaatagcagaggttttgaggttgtgtttttctccacattgcccatttccctggcggccactctcaggagctgtgaagagctcaatttaaagacagtcatatcagttattcatcaattactgggatcttttcattttttaagcatatcatatcaacaccccttttgtaggactatagcctgtctgagcggggctgtaggagagaagggtatacctctctgtcattacatcattttcttctttgtccgggccatatcaattgccaatgcctcattcaaggcctgacttttgagcaatgagatggaccagccagcagtcattcctctcagtgactcaaggagactgacatttgtaataacaaggagttactgagcacttggtatgtatgccaagattcttagtatggacaccagggatctgcagagcaagcatgtccatttcattaaaaccaatctctccactcgtgctctggataccatccccttgtccttcccaaagactttcctcctgcaataaacccttctctccctaacatgatcaatttctctctccctcctggatcatttccatgagaaggcagatgtgttctggtgcctactttccaaaaaaaaacattctctcacatcattgctccctccagacacaatcctatttctcaactctttcacagcatgccttcctgcaaagaattgtctgtagtcactgctccacttcctcacctccttttcttagctcagccaactctggttaacttccttctctccatgcccctgaatctgttcatttcaaggtcatgaataacctcttttgccaaacgcagtggccaccactgtgtcttcatcttattcaactttcgaaaatatttgacatagttgatcacttcctcattcttaaagctgtctcctctcccagtttccatgacaccactttctccccttttcctctgacctcactggctgcattgtctcaggcctttttgctcgtttctctttctctgatctctcctggaatgactccaggctctgtcccagatcttcttgtactgtccatctataagctctttgtaagtgagctcattcagtctcatgtctctaaataccatctacataccgatggctctcaaaattaaaatttctgatcttgatttatctgacctatcccctaaggtcaagttcttatatcctactgacttctctatatcactacatgggtgtctaagaagtttctcaaatgtagtatagacaaaggtcttggtttcccaatgtccatctttgcctctctctgttctccctagtaaacagcagcaattttcacccattgaaggcaaacatttagaagtcatccttaagttctctctccctcactttcccaaacgaatcatcggcaagtcccgttggcaacagtttcatgtcaagagttaattttaagaatcttttattcaatttaaactgacaatttttaaaagtttggaaagtgggagagaaaacacccatgttttctcataatcttcataattatcattttaatagcacatgctgtatcattgagtagacatatcctaatttactttacagtccccctaatgttgtatctttggagtcttctcacattttatttctataaacaattttcaatgaatgtctgcatgcctatatagatgttttatttttstttttaaagtagagaagctgatttttgctgttgtttttgttgctgtataaaagatcactgagtgattgccttagttatgcaacaatagagaaataagtgtctattattctggtgttcaggtaaagtagaattctatcaaaattgtcacaaaattgtctttgatgagagccatcatagtgcaaagttgatgactaaaaggagatggttaagttgtytaaagagcaaggccataggagagaagaaactaatattcaaagcttcctcccacagttcaaagttagagaaacctgagaggggtgtactggtatgaccacccgagatcccatcgctgagaaagataatggccctggagacaaagactgatgaagaaagacagtatccagctgtgatgcagatgaaacatgcggcatggttgcactcactatgcagccaaggctggaagccactctggatccagccactctggcacagcgttcttgctctaggaagaacaactgaacatggccacacaggcctcacagctggcatatggaggctgttaataagctgagcttgaggcttcaaaggactcttgtagcctgtgctggatctagcagtgaccagtatgccagtggccatggatgcccaggcccatgttcagtagtgaagcaggtgctagcagcagaagcaatagaaatggaaactgggagatctgctgtggatgaatctcattatcttctttctctgaccctctttggactaaataaactcccagtattcttgaccaacagaggtagggttggaacagaacctcaaaagtcatcatyagacttcctactaatagggcattggaagttcaagcgactaactaggaaacaggttagtatttgtacccctacactgtgcaacagattacataccatttgctctatttggcatcctttccttaggctagattcccagaagaaagattactgattcgaagggcatgaacatttttatgactcttggcctaaattactaggccaaggttttttcaaagggatgcactaattttcactatttccccacaccctttcaggtgataaataattgacttgatttgtttacactgacgccaagaattcttgggaagaaggatcaaagtgaaaagtggtagcccatggtggggaggccacactcagtgcagttgtgaagtcagcagcatttttaagcccattcattgccagtagccctgagatgagcattcccaagctgcttcccaggtccctcctccactctctcagggacatccattctgtaccagccccctcagatactcatgcccttgccctcccttctccatgctcattaaaaccagcttaagagcagatatgacatcagtcacttaccttttcgtgtggctctaaatcaaagtgtcacctctcccaagcacatgcttgcatcttagctctgattgaggaatgaaaagctttgttctctgttaaaagaactttgagcttagatgccccagactgagaaatccaccaaaagctggacctttgacttgagcggcaaaggacccccatagtcaggctgtgatttgaggagcatcaagaggccagagtttccaagttgggacccagaaggtggggttggcagggggagggtaggagcagctggagactctgctctaccaggggaatacggaggtggggaccaatcccagggtaaggaatgaaagtaggagccccagaagctgaaaacatacttcaccgatgtcagcattttacccagagccattccaaggtgaccataactcacttaaaagcctgaaagctgttttatgccaactaataaagtgcagtttaataaaaaagttgtcaatcatttttatataaaatgtatttggggcatgaatggttttgatcttttataaagtcaaaagcttttagtgctgctcatggttataatcactgcgtgagcctgggcaagcctcacaaccttgctggccttgactttcttatttatgagctatagacaattacacccagcctgctgcctggagggctggkgagagtggtgaattgagtgttcaagttgaaagtaagaggtggtcttcagcggttgactccaagcattacttatgatcaaggtctaatttctaagagtccaaaattaaataacaggtagaattgaatgccttgagcttgtctagtgatatggaagtgtagctaatagcctacagcctaaccgtgtaagatacaactggaatataatacaaaccccatggagagtaaaggacaaagagaaattaaagtaagaggcaggaaataataaaacgatatttaatttggacatgtgcccccaacgcatctgtagaaaaatcaacaaagcataaataccaatgggaaaacctagccataattactctaaaagatatagagacaggaaattggataggagtttgcagtgttgttttgggctgcagggatgcccctgtgtgcctgcaaagggaaatgagagtttatctctgaataatcagatggaattgtacatcaaataagggtaaaattggtcatagtcatctcatgattgcagtggtttctatgttctccaggtcagtccaccatcattgaggagacgtgggtgcggagaaaggggtcaggtatgtggtcagacatctctgtgggatctctgctgctaactagctatgccacattaagtatgttttaacttgtctgaccctccagtttagctcaacaaaatagaagaaaatctccctttcaaggctgttggaaggactacagatgaaaagtatataaagttcccagcagatggaaaatatcaaataaatgtcagctagtagcagcagcaggagcaaagatgaaggccgactcctgagttttcagactccacagatcccagaatccttctctgctctgagttctgagtcccacagttctgatgcatccacctgtgcacctcaccggcaatcagtgggagcctgggaatggttaactaagaggggcttgagaaggcaatgagagaggagcacaaggaggtaaccagccactccactgaagctgtgtttaggtggtggatatgatctgccagcggcccctcagccaaaaccaccaatacaaatccaygtagacagtttcttaaacaaacttagtaaaatcaaatctagaatatctccccctttcaaacaatgcattttcccagtgccaaagtacagcactttcttagcatcttccttctacaaatgatggcgcgatgcagtttaaacacataccttgccaattctttttaaaatgtaggcttatatgataattttaatcacatgctttcccaattattacatgtgtatgtttatatggtaatgttaaccacatgctttgctacatgcttgctgtgagtgatgttttattttatttttagagacagggtctcaatctgtcacccaggctggagtgcaatggtgatcatagctcactgcagcctcgaattcctgggctcaagtgaccctcccacctcagcctcccaagtagctggggctccaggtgcacaaccacatgttgctgatttttaaattttttgtagggatggggggtctcactgtgttccccaggttggtcttgaactcctggcctcaaacggtcctcccaacttgacctcccaaagcactgggattacaggcccgagaaccacacacagcctgctgtgagtgattttaagagaagctgttagagattggggccctagcatctcattraatcactggttgacaccaccacagcctcccagctctcaagcaattcctaggaaaacaggaattcatcgggaaaatattcttgatcctgataccaaaattaacaaagggggctgcttcttgtgttgtattctcaacagcagaaatgacagttgtgcccatcaaaacccccagagaccctgaccagcagggaagagcagtagcaaggagataggagagaagggtggtataaagagtttaccttctttatttttctctgtccacagttcctttaygcggaaagctatttacagcagccacagtctctgtttggtttggcatgacactgactttctatggataagtcaggatctcatgtcctcatctaaaaatggtaccatattgaatgacgctttaccttcatttctctcacttcactggttttggatgagcataggggcacctttgggtcagagtacttttcagagagggacagtcaataaaaagccttcgtgtataactagtccattttcatgctgccgataaagacatacctgaaactgggtaatttayaaagaaaaagaggtttaatggactcacagttccacatggcaggggaagcctcacaatcatggtggaaggtgaatggcacgtcttacatggcggctgagaagacagaataagagccaagtgaaaggggttttgccttataaaaccatcagatctcatgagacttattcactaccatgagaacagtatgggaaaactgtccccatgattcacctatctcccaccaggtccctcccacaacacgtggaaattaagggagctacaattcaagatgagatttgggtggggacacagccaaaccgtatcagtgtgcccagagagagagtgggtaagaggaatagaccaaaacttgaactatgagaaagagaagtaagacggtagggaagactgtagttcagaatctgtaagttataactgacttctcacagcctggcaaaaaattggaagctggagtataggacataaattcatgagcagtagcaattttagccaagtcgagagaaaagcattgaacttcaaatgaaaataatgttcaaagaggtgaacatgaagttcattcaagatgtggagggaattatgagcagggagatgcatgccaagagaaactagatggtatttgaaaaaagtgagattcaaattaaggttcacacacagagagagagaaagagggataaaacaaaaatattttaatggtttccttttcctgtggtctgctttagaattcacccaaaagccaattgtttctgtggttattcaaattttgtttctcttctcactccctcctcttgtctatcctctgatcsccagcatttggacagaataagagagaggaagtaaaactcaaatcattttactttactttttcttggccatttggctaagagatgtgtggggtgaagaggtgcttgtggccaaagtgtgatttgtaaaatgtgtgggtattttttgtttggttggttttgcttttagctgctatacttatgttaccccagtttaccacatccagtcctctttgggcacaaagggaaagactcaacaaacatttgttgagtggcttgactcagctttgctccttctcctgagtattcctccgtggagttttagcaacttcccataggaaatccaggctaaggtctgattcatccagtcctgaataatgtgttaatcatgaattggatamaaatcatgaattggatactactcaagaggataagctgttttcaaacatcttagcagtaaatatttgcaaaccaacaagaaacacactaaatacaaatggcgtttctcaattcattagagcaagcctgcaagaaccttgacctgggagtagtgaggccactttctcagcsactagttcatgccattatatatacataccagttttaacaatacattatttttataattttcaatgtttgagattattcatgaacctgaactgcccttcaacctgtaaatctgaataagtgaggttttactatgatttacaaaaccataaaacaagrcagaaagaggtctgttcatctaatagtggctgtttgtttctcctttcctttttggagaggagggaaaaaaagagcaaatgtctatctagcaagatgacgtagggctggataaaaagataaatgcctctgaggtgtgtagggatattacaaatgtgatttggaagaaagacaagatctgagggggtgggaagttcagtgtagaaagtctcttctatcaggacatggattctaattctctcctaccacactgggcataaccatcagggaatttaaagtcccttccatgccaggcatgccccatcacctaggaagaaactcaacccatcagcaggcatccaaaaaggcgtcagccaggtagggtcccaaagagccccacacctygggttatctgggaaaatcccaagttatttagaagacagtgtacctcttgcctctacccttggtggtaaacattgcttcagagtcacacacacacaaaaagataagcttttttctcaattgaaaactggaaagttgaaagaggaagtaaagagaaaaagaaagacatatactatawtccaggagtcccacatgttcagaaactcttcacctgtgaatctacattttactgagttcacatctgccttctgaagggtaaccactctttaccccccaaattcaactcattacttgttcaactttgaccaagaggtttttttttttttttttttttttgagatagtctcgctctgttgccaggctggagtgcagtggcgcgatctcagctcactataagctctacctcctgggttcacgccattctcctgcctcagtctcctgagtagctgggactacaggcgcccaccaccacgcctggctaatttttttgtatttttagtagagatggggtttcaccgtgttaggcaggatgatctcgatctcctgacttcatgatccacctgctttggcctcccaaagtgctgggattacaggcatgagccaccgtgcccagccgaccaagagatatttttaagaaaagtctcataaaagcataaaattttatatatggcaaaagcaatcaacatctatagaaaactgataaacacatatgactcagaggaagaaatttccctctatgtattatttactgttaaacttactatggcttataaggccttgatcatctaaacacttgtttcgatttatccattctcttcctctcctcttcagccttcttgagattgtgggtcatctccagggatacttctccacagttctactatcagtgtctaagggattcaggttagggcaacacacacaaaaagtcaaattcagttattcaagcaccaattagataatgaacatctgcctggggtactcacgacattctgggctaaatattcccccagagagaagaataagggagtactcagtgggtactaatgtctggtctgtgacatgacaatgaagtgaagattaagttccatctttacccccattcaccatttatctcccaatctctcttcccaagtcattcttttttttttttttaattatactttaagttttagggtcattcttatcttcttctcatctcttacctgttttytcctgaccctaattcctcaaagaagcttaattcacttctagatcccctccttcccccatgaatataaagaaaataactatatctagttcttttagatgttcaaattgacttgattgctagctgaaatcaaaattgaccagctgaagtggttttcaagaatgttaattcttattctgaccactggattagcacaatgggccattgtacacataagtacacccacaaggcagtcagtaaaatagacaatgcctaaagctgtagatacactatatacatggcatgaatcttttattcatttgtttagtctacagcaggaagccaactgcctcacttcaggccagagggagaatgctgagatattgtacgaatacatgcaattttccaagcttcaggaaatttgaactgaaacattgacaggaaagagcccatagtacacttgcatgttgagctggtgtttaaactctttttcccatgtaatgagctcatatccaaaatgttgactcaacgtgcatgaggacttggcaagtcctgtggggaggagcgccctgtcacgggaaacaggagaaaaacaaggccggctcagcacattctctcagagcacacaggccttcatgggccagagtttctgttattaaaaataagaaaagaaaaaaaacagagaatgtctcctcttaatccagcaataactccaagaagataataagtcaacagtcacttttttcatggctacctactacagagtgtcctagtaaaatatatacttgatacattaatatacgctttaaaaagaayagcagttagacattaaccaatatcygttttggttatgttaaagtcacaaatgtttaaaatgcccatcgtttcacagtcaaccacatataagatatatcttgctttattaagtgtatttaacacctaaaagtgccacacactttccagggcacactcatctgagggagtttgtagaagatgcagtgctcatggggccctaggttgttagctctgaggctgccatgcttcattcaccaacatgtattcccttacaacttgggcccagcaacaacagatttactatataagcctccagtacttcctgaaaaagtcctttccaaataccctcaaaaacaaacaaacaaacaaaaacagtcctctttctgtgtttcaatcaaggctataaaagtaacccatgttaaaaagccaggatggctgcaatgaatggagcacacagaaggcctcctgagcagtatagactttatttttccatcgtggggctcctgtaatttttaaaagtctgtttgaagatattaatttggcaggaatgaggaagatggattcaagggattaggaactgtagggagatgtagcaagtggatgaaggcctggacatgaataatgttcacaagaatgggaaggagggaaagattaaaagggatatttagaaagaagaactgacaagccttggtaacggagcagatataggagataatgaggagagaggagttggagttggagttggtgaggagagatggagttggagttggatacagygacaacttcgaagtttctatccagaggctgggagtgtgatgggccattgacagaaatggcaaacggagagctggtttgcaatggatcaagatgagggttgaactcagagattcttaaatctaaaacatctcagaaggcaccaagcccaattttatacttcctttctgtatattagagactgaggcccacagaggagaggataaagacccgttgaaggtcttagttagttggcatggagcagacactagtacccagtctttggtctcttgtttctatgcctatgatcattattcaatggtcctgtgcctaagctagaaatcttttgattgcgagtgatggagaacccaacccaatttgacttgaataagtaaaggaatttattggctcttacaagtgtaaagtccagaggtttcagttgaggcatggtccaacagctcaacaktttcactgagcacctagtttccttttgtctaatctctgcccaatattgttcatagttccaagatgttcaccaagaggtccctgagctgtgtgctttctcatttacatccagcaggaaagaaagaaggtttttgttctagaattccaagcaaaagtcctgggattcactctaattggatttgcttggtcatatgtccacccatggccaaccacatggctggggagccaaatgtgctggtctgggtcacatgttccacccctggagccccaggtagaatcagattccatagagccaaatggattcccaaactccaatgagggctgctaggaagaaaataacagaagctacagcatcaaccaacaaatgtctattacacattgtttggctaaatctccttctgttttttccatagcaagtttatgacttttatttttattttattttattttgaggtggagtctcgctctgtcacccaggctggagtgtagtggcacgatcttggctcactgcaagctccgcctcctgggttcacgccattctcctgcctcagcctcctgagtagctgggactactggtgcccgccaccacacccggccaattttttgtatttttagtagagatggggtttcaccatgttagccaggatggtctcgatctcctgatctcgtgatccgcctgcctcggcctcccaaagtgctgggattacaggcgtgagacaccgcacccggcctatgacttttattgttagatacaatgatgaagtggtttgtccacaagttttaaaaatatacagaaatcagaattgccatactcaccatggaaaaaagggagcacagctttaacaagaacattttaaagagaaagaaaagtaattagggtgaataaattcaaattttagacaaagtcagtcatggtgacatgtgcctgtagtcccagccagctacttgggaggccaaggtgggaggatccctggagcctaagagtttgagtccagcctgggcaacatgggaagaccttgtctcttaaaaaaaagaaaaaaagaaaagaaaaaattggtaaatgcagccaagtctttgtcactaaaatatattctaggcaacattcttcaaagccaagcaaagtctgtggctgctgtgtgctggggctatttcctctcaattcaatcatgggttggggtgatggttaataaccctgaaatttaaggtcttttgtcagtctggcatcaatgatgagtggtgtgacaaggcttggtgtatcactgataattgcttagaaatgactccacactacccagttttttggtgtatttttcagcagtattgcataagaaagtctttagcagccactggtacatgcttctgagaagcatttgaccacagaatatcttagattcaaaacacattgctttgtgggaagaaaggcaccacccagcacacacacccatcctaattttgaatggacttaatttctgaattctagacactgcctcacaatgatataaaaacaacaagagcctcattaaaaccccagaggctgagcccacaaacaggaattcatagagtctctaagagaaagatatctgggcaacatttctaaattttgagctgtctggctggttgagacagatgatctgatggcaagaatgatttgcaaaaaattcaacactgaccaatcagagcagacagtctaaataaacaycgattcttacaaggctaccttccttaccagttaaatatcagtcctgcctcagagaaacataagatctaaagaggaaaatctacacaagattgtgtgtgggccagaaaggccgccgtgaatggtgagaaggtgagtcaatccatccatcctaagtcaaagaatccaaccagttccatggaggaggcacagaggaaaagaggaaggaacaaagtggaagaagaagagaatgaagaggtgggaagagatgggcaaggatgggagagcagaagccaatcaagagaagaaggaaaagcaaacagaagagagtagaaaggaatgggggccagaaacaagcaggaatcatgaagagtggggaaaggagagactttggaaattcaaacaagtagaggagtgaaaaaaatagtgatgaaaggtaagaaaggtaaggtaggagatgtgtgaaattgcaataagaaaaatggcagtgtttatgcgtgatcattgagtcttacttgcattacacttgcattacacttacactgtgtaatgcagggctcagaaaactttttctctaaccagtcacatggtaaatagtttaagttttgtgggtggtgcagtctttgctcagctactcagctctggtggtgtagcatgaagacagccatagacaataagtaaacaagtgggtgtggctgtgttccaggaagactacgaataccagtgatgggtcagacttggcccatgggtcatagtttgctgaatcctggtataatataaatcttctgcagacaaaagtgcttcttacatttttggcacccacaacacctagatacacaataccaggtatgttacaactgcatggaaaagccactttataggccaaatggcagcaattttcaatggctttttttttttttttataacttttgacctacaaaatgtcagtttcctgtgatgccaccctacctgctactagactggccatctgatccccactggagaagccacaatcatagggaaggaatattccatttggggacagataaagtcaatgaaaagatagatgttctcagtacagcccaggccagcatgrgcaaaggtggatacttaatgtctagtcagcttgcatgccatgacaaaataccacagactggggacttaaacaacagaagctgattttttcatagttctggaggctggacacaagatgagggtgccagcatggtcaggttctggtgaagtctctcctcctggcttcagacagctgccttctcattaagtcccatatggccttttcctctctctcttcctcttcttataaagccattcatcccatcatgaggaccctaatttcatgccctaatctaaccctaattacctcccaataaatttcatctccaaataccctcacactggggattagggcttcaacatataagcttggggagggggagatacaaatattcagtccataacccttaagaaaggcctttcattgattttcatcttaaacaaaaatattcttacctgttttttctggaaacgaataaccagcctgtatgacactccttgggctccacctctcacctggatatattacaacactgtgcataggagagattcaccagatagctgatagagaactttacattcagtacttaaagctttcctattgtgagagagaactccatccagcataggaaatagctccacagagtttttatctgagccacatactgcctcagagatcagaacccaagcaaaaactctgcttctttaattcatacsctcccttatttcctcaccttgggctcttcaaatgcccccagcttgactgtggagctggcttcctctccaaccatcattaatttcccagaggggcctgtggtacttgggaatagcttcggtgatgagaggcaacaaggtctagccaagcacagctctcyaggtcttgaaacatccttaaggcctaagcctagtatcatagacacgggcttgttctaaccccaaactcagacctctaacaatgacctcacttccacttgcttcttttgtgatttagaagagcaccttgcagcctctgaaatgcgcagttcttgcttggtgaagggttcctgttttaggaagccagcactactatttcattgcctctaaggcacaatgcagggcatttgaggttgattttgtggtcggtttgtttcctttattttcatttgttacccagcaccatgcccatatttccaagtttgtcttggctcctgatttcagtcattctttgggcaccaatggctttcccaagtcatttaccagggtagcacaagatgccttacaaattaccagagtaaagtaatggccccaacaggtatgcttttgaggccacatgaggagatacacagctgcaggattccctatcagcaaagactgaatgatgtcaaacgttcagaaaaggagaaactaagtgggtgyagcacaatcaatcactttgcatttcaasgtgaacttgcagctcttatggggagggaattctctatgtcattttccacgtaaataaagtaatgagaccactttgttgtagcaaagaaattcagtttgtttctagaagcagatgtgtgtgcatgggtgagtgggcatgtgcatatttgcttwaaaacattttccartaactgctgacaacagcaacctgaagcctccaggcacccagtttctccccatcctgagatgatctttttgctcctggagcagcattgacgtgttccataggatcatccctgtcctcactggcctggcctcttcagtgacctgaaatctgcatttcctgacccttcttcctgggcctcttcttctcagtttctctactcttgtcacacaaagttactcaacacccagtaggagcttatcagagccacagcaccacgttccaagggcaaagaaggagaaagagctccacatttacatcccagccttggatttaagcctagagatcttccytcctctaccctcccacccccatcacttccccttccagcacccatcattgctccccctggttgaacctcgtccttgtgaggtccaagtgaaaatttcccctttgtcctctgaaggtttactgaaaatcacagacaagaggtagattaataggagaaaaggcatgcaatttattgttaatgtgtacacgagagccttcagaatgaagacccaaagatgcaaagaaattgtccatgttcaacaaagtatgatagcttaggttcaattaagtatggacagccatgtagaaatatgattcgacaaaaaggctataatctaacgctaatagactgagtggggatccagcaaggcctgtctgcctaggttcctcttggcctctgttcagcattccttccttctggttatgggcaggaccctcactggaatgggggtcttatgacctacagtcaaacaaagtaggccagataatttctttgtggccagtttttacgcagaaaggcaggggaatgtcagagtaatatttttaggttttatggctggctttggagaaagggggtcctggtttctatgactcacctcgaagattctagtttccatggctagcctaggtggagactgggactgagacaggagggcaggataaggtcagggcaaaacttgtgcttcctttggggcactgctttctaagtccaaacactgttttctgcagcccactgctcaccattttccttcatgaggaggagaaagtctcagtttactaaacttttctagcctctgttcctgcctctataaatggtgataatacagttgtgctgtgtgctcgcccggggctatggtgaggaatcaatgaggaaatatacaaaagagccctagcacagaacctgattcatcactgatgctcggtgagtgttcattatacacccccaacacctctactaaccaygttgactgtgactaaagtaaatgtagattggcaagtcacactctggaataaagcttcccaaccctgacgcctgacacaatcacctgggagctttaaaaagcaccatgcctggccgccacaatcatctcttgccctgaaatatcctgagggtttggcctcccttgttccttgttttgatattaggcaacattcctaggccaccagagcagctatttgattttctttttcttgtccttctctttctcccttttccactaagttttggggataatctgttgcactgcaatagatacctaatatagtcctcttttcaccacgtggcattctgatgtccctgactttcatagctatttcatttttgcatgacttttctttcccagaaataaagtgttcattaaatttgcatgtcctgatgcattcatgcattattctttaattttgatatattggcctgatctgttagccttcttaaaaatgaatgtggccaggcatggtggctcacgcctgtaatccctacactttgggaggccaaggcgggcagattacctgaggtcaggagattgagaccagcctgaccaacgtggtgaaaccccatctctaccaaaaatacaaaaattaactgggcatgatggcaggtgcctgtaatcccagctactcgggaggctgaggcaggagaatcacttgaacccgggaggtggaggtttcagtgagtcaagatggcgccactgcactccagcctgggtgacagagtaagactctgtctcggaaaaaaaaaaaaaaaaaagaacactttctttagtagtagttgcttctcattagtggagccatgttgagatttcatctcttaagaaatgaaagatgacctccctccttagaatactgaataattcatcagggcggggtacaactgtggagctctcctgctactcctgatctcttgagccccattcctttctaattattaaatggcacaatgccgaggaatccctcctgctcctgaaacagacttctccaggggcgtcatggctgactctcaggtccctcagtttattctctcctgcttgtgcagaacgaaacaaatacaaatcaatattttaaaacagacatatacttaatattttttaaaagccagaatatctacgtatactaatttgcttgtctgttatattcacctctttttgtatgatagctatgtttttatacacttatctcattagagtattataccaaactcatagcctttcacaaaaacaacttgcattaatgaagccgtgattgccttttatttgatgttcacattttcacagtggggctagcaaaaactcctttaagtactgcctctgatattctcgaacactcctttttttcagtccacaacaaaaagatgttccaagccatcctcgctttttttttccctaagactgcaattaactaacttccaagaaaatttgattgctttgagaaaagaatagcatcagaaatcacaattcaagcttctcacctgtgcatcagcagtgaagagaaatgctggtcctttcactaccgccacttagggcctattttgtgacagagccagtaaagatgtttttcagagtgaggaattcctactgattttccttacagaatgtattatgttgctatatattgttttagtcagccagggtctcttaagaaaaatagagtgagtattactagaaaatctaaatgtgggtagatttccagtcaagcagctaggcagaggcgtccagagactccccgtgctcagcatagcgttgtgcagccttgcagggggatgccttgggagaagggagcagtagcagggctcacagctggctccgtggcactgcctgtggatctgcattgccttctgttaggattaatgctttgtctccagtttattttttttcttttttttgagacagagtttcgctcttgttgcccaggctagagtgcaatggcgcgatctccactcaccgcaacctcccgagtagctgggattacaggcatgtgccaccacacccagctaattttgtgtttttagtagagatggggtttctccatgttggacaggctggtcttgaactcccgaccttaggtgatctgcccaccttggccttccaaagtgctgggagtataggcgtgagccaccgtcttagtctccaaatttgttactggactccgagcaaccctgatgcactgctgtagagtgccaatctcccagtttgctcaagactgaggggttttccaggatccagaattttccattttcaagctgggattgtcctgggccgactagaatgagatggtcaccaggtcaccagtgagctagtagcagaaccactcaaggagctcatcacctcctgcacagagcaggaaagagacactctgccctctgctcagcagaataccagaggacagaataaaaatatatttgggacttactcagaatcaatgggaacttaagagtcccgctgcagtgcagacagattcagattcttcagtgcatagggccaaggtaattacaggcaaagctaaaagaggttgtggtaaacatatagctgtgaacaatcgtcttattaacaaagtcctggtctagctgtaaagcctggttttccttccctgtctcagagagctctgtggaaggtagttggtagatctgaaagtccacaagcagattctccaggtgcaaggagaagtgtacagaggaaagcctttgtaaatccacactcagaaactgggcctcacattagaggtcaagtttaggtgggagtgtattcacaagtaccctcatgcatattggttttactattctacactcagagccttggctacccaagagccaaatgtgtccatgaactctgggaagatcctgcgaaggccagacaattcctggggcattctgtgaagctaggaagccagagttggaagggtcccactctgcctcagccctcacatgacctggtccaacaytgccttacagatgaggaaaactgaggcctagagaggtaaagagacttacctaaaaggcatggttggccactgttaaagttgggatttaaaacccaaatttcccaactctctgcactaaataaattctgcaatgctgcttccattgcaatgagagtttgaatactgagtgtgagctacttttctgggcttctaatttctgagaacaaagtttagcagaggaagagaatcgtgaaataatttagttcatttcatggggcaccaatagcattcaaatactttcagtcgaggtcatgttcatccacagcacagccttgaccttagcaagagcagcaggcagattgagtggattcaattccaagattgtctcctattttgtctctttaggcttaaatgctttagcaccatttcaagggagaaaattcacatcacagaggacaaaaaaagctgtcattctttctaaacactaaacttattgtcatcttaaggtcttgactgttggtgttccttctgcttatttacattcacatggcttcttcyttgtccttggtcaagtctcaactcaaatatgattccctccaaaaagcctttccttgttaccccaattatagcagtttataatcagccccaatcttaactcatctgtagtgaattaaataacatctcccaaaaattcacctccaccaaagcctcagaatgtgacctgatttggaaatgccatctttgcagacatgattaaggtaaggattggaataagataatcctgcattagggtgggccccagatccaatgagactgtccttaaagtcctccacagcctaactccaggctacctcgccagtgtggattgtctacactgmctgcctgctcctggaaaactgatcttcctaccaaccaaacagctggcttcagcttctcgccatgcaagtkyctgccacatgccacttctctacctaggaagttctccctcctttcacctgaacctgtccaaatgttactcttccttcaaaatagggctccaatctcaaaatttctgctcccatggggtctttcctgatgycgtgctgccgggcacaatctcaggagactccagcaccactgtttacaccacccttgtgtgtgtgtgtgtgtgtgtgtgtgtgtgtaagtggacctccaatggactatgtgctcctacagaacaggagctgtattttgaagttgttttgtttgtctacttgttttggttttgttgttagtgttcttttctttccaggccttgaatgctctatggactatgtgacaatatgtagaataaaagacagattgcttggttacatgaacagattaatagcatgttacttcgctccaccctaaagcaagtcctctcagccacaccccactgcaatgcagtctacatgtgacttcttggccataattaccaaatggattcagaggcagagaagagggaaaatggcaagtcccttttctcaggctgctgagataatttgcttagaggacttaagaggtagctctttaggattcccagaaataattggggaaatatttgagggtcccacacaatcagggaagatagtaaaaaaatactcaccactttactttgaggtcactgttgctgccatcatcaccccagagttgtttcctactcttggttatctggagtcacactgagctcaaaacagatggccctgaaactgctctctgaagcagtgagcacacaccgtctaaacacacmaatatgcgcatgcacgtgcacacacacacacacacacacacacttgtatgtcaccactgaactagtaaccccaagcaagctgaccaagtgctcttctcctgaagtttcagagatttcattgcagaaacacaatttacttttatgagcagcacttctgtcccaaggcctcagactaagctggtaagtactgattccaggacaaaatgtgacccacatcccgaagtgtcctgcattcctctttctgccccttataggttctttacctgcaaactctctccctcttgtccaaaacattttacctgctctgtcacytttgcatgatcacaggtccttcgcgttccacaatcagttatttccgtaccaggtttgttttatcactttgaaccttaaaacacagggaacaaaattttacccactgtcaaactgaatctgtccattgtgagatgctacaccactgaattttgctgtgcatccgtccaattggaaaaggaatgaatgtgaaagtttcatttaaaacactccttcatgaaactctctgtgcatcaaataactgaaagcccaaaccactgatcagttagtaaagctgtgaagccctctcaattgtcagaagcaatttgaaattgaactgaaaaatatctcacggtctcttagaaacagacacgaattgtggtttgtaacccaatgtggaaatagttacggagaaagtgacaacctcttgtgaggtgtgtgcgctcttcctccaagttctttgttctaaggtcagagggctgatcacctcactgctgccctacatagtcccctcagcaccagaaaatgctcacttaccaccaaatttacttccaaactgtagtttatcagaatataattttattttctgaaagaagtgcttcaactttgtgtattggcacaagataactataaacaataccaaagaaaacggtcccctataatctggccatttatggacacagcaccagagggaaaaaaactttaaacataaattaagaaagttctctgtaagagctcttgttgaattatagctgacaacagtacacacagcacagtcacgccactgaattctttccagctccagctccataattcaccttctcccacatgtcctctattcttgaacttagaagacttttctcaataagggtcactaaggggatcccagttgggaatagaagaacaaaaaagtttagtaactattccaagagtcataacatcgtaggcaataaatgctgcatttaaagactacagatttaagattgtgagcagcttctaccagacactgcattaccctggtaaagtcacctgccttctttgagcttcagttttctcatctggcagttgttcaatgggtttagtcatttgcaatcatttttattaccttctaargtcccctttaggtactgtgatggagaggtagacagacagaaagatgatagatagatagatagatagatagatagatagatagatagatagatgatagataggtgggaaagccttaaaaactcaaaaaagtaaggaaggatgatcccaagaaataagaggaaccagagctcttctccctgggtctgagagaagctggcccaagccatccttccctgagtcctatcctgctcctgcttggacttcccaggacagaatcctccctgctatgtgtgaggcagccccaggccctttgtactgctccagaggtctggggagcagtgttcgaatgggaagaaaagcatccaaaaaagaaaaaccaaagagccaatgccataaatatgtaaatgcccttgaactctactgagaattcctctgtgccccaatagtttcctcccctccatgtgggttatattctattttcccaggcatggagtaagggagaagaataaaattggagctgggtggtgggggagtagcctggaaaagacacttatgaatgcaaagaggccatagatttcattaccaggtgcatagtatcatcagctcccggtccaatgcttactcatagcacaagctgattaaatggttgtggaggaagggagggaaggaaggaaaaaaagaaggagagaaggaaggaaggaaaattggttcttatgctttctactggaaactttttatctattcaaggaagaattaatttttgatgtttactggctatatattttgcactctccaccttgccaccaccacatatttatactgtgaccaacctagctgaaatgaacttatattttaaatgagtcattttgcagagcaagtaataaatcagctatcaggagtaaggagctctcagcaggccatactgctccattgccaggagggattattttagtagtatcacactaggatttctgaatttatgcccttaatttatgagacattcattgcaggggctttcccaagtgttattttcataaacagcagattaatataggggctttttcttgcatttctttggaaaaatcttgcccccatgtagaatattcaagctctgctacctataaataagctaatgtctttcctctgggctgttgtcccttagccttcaacatcttctagtctgaagcaaaaatcatgcttcaytttgttttgctatctttctaatacagtaagagcttcaggtcaaagaactgaagagaatgtgagagcttgaccctctgttatgtttttcgttatttgtagattttccttatgcacttgcccttctgtggaatctttcctcttcattcccttatccctattaggattctaccaatttattgttctaaccttgaagaaacagctttttatttaccttcagctgtaggtggcccaccaggtgtcaacaactgtagagttccatcaagagtcatcattttacagttacaagtcggaggggccttcacagatccgtcaggctcaacactgcctcctyagtgagcctgtgaaccacccaagacggctggtcatcagtgtcatcctcttccttttccggacaactatctttaaaagaaaaaaaaagagtgtctttgaatgtatccattttatccccaaataatcttgtttaataaattccttattaggccaaatccaatgtgctgaaatatctgccaagcatgtcattctacacaaaagggatttgcaaatagccagtagttggcgtgaagaaaggacatgtgaaagcgctgggtgtggaatttcccatcctcggccggaggtctactacagctcgctgtttgcagatctgggctgagctatgcatcacattgttcatgaaagaaaaagcaactgctctccccagtgccccttccccgctccacatggctgcgatcagcagccccaagaccctaattgccacagcctattagaaataatgagacttacatggcagaagccaagggtaaaagcgacatctcgcaacacgaaaggttaatatcaacatatacagctagtgagtgcaaagggcacctcagttggtggctcattatggcgggctgacccatagggaaagtgtcattctgcagagaggcctttctcaggatgtggcagcaaaagttacaaaagataaggacttgcctgtgaaacgcactcaactaatgagagctgaagattgtttgaaatatcccgatgacctcacagatgggggatgctgattaagatggctacaggaggctcctttcttgtctgacagcccattgagaagctttggtgagatgtgactaacaggccgtgaaggtgtctccatcttctctgacatggtccatgctttgggcaaaacaaacatgaaaaataagtctgaactgacacacatgtttgaatttagttttcagagccatatttgggggaaggagcactggtggggccgtcagcgatgattcctttatggtaaagggtgttcgtgactacttgcgtgactaatcgcatgactgcgctggggggtgagccaacggcaaattgaggtcttgaacacttgacaaaacaacccctgttctgtgggtgaaattctatagagcttcatgcgtaattaaatgaaagtttcacaagagtctacacctcaatcatttaatgccgatatgtagcacaaaggaaggatttttgccacatcaaaatacatccatgaaacaatggagaaatgtcccaagttttcagagtcagagatactcacagaagaaaccctggagttctcttgaccttcatttagtgcctgggactctgaaaagagatcaccattatgctctcctctacctcatactagaggtgaggatgagagcgcacctcatactgcatatcttaattcctctcccaggacaactggaaggaacacctatccgtttgccatgtcactaaaacaaaaatcactcgtgtcttgcaaaaacagttcagatctttctatttaaagagcttatcactatattaaacaaggttatattggagttttgtcatgagatttaagaacatttctttcaagtctttctaactagttgttttagttattgattgctgaataacaaattaactcaaaaattagtgacatcacagtagaaaataaaattacataaagatttttataatgagatttaagaaagatttttcaagctttactaactagctgtactagttaattaattgctttataacaaattgccacaaaatatggtggcatcaatgacaataaacatttattatctcatatagtctctgtaggcagcctcataaggttgcagtgcagatgttgaccaaagctgtgatatcatgtgaaggtttgtctggagctggatgatccctctcaatttggttcgctcacatgtctggcaaattactgttagtttcattcaggaggcctccgttgccacatcagcttctctacagagctgcctgcatatcctcacgacatgggagctagcttcccctacagcaataatccaagagaaaaaaaaaacccacaaattcttttttaacctagtgtgtccaaggtcatgccccaccatctccacaatatcctagtggtcacacaggtcagctctattcagtgtgggaggtgaatacacacaggcacgaataccaggaggcaagaatctctgggagccatcttgcaggctggctatcacatttattaaaagtatttcttaaagtatcttcacctgaccaaaaaatataaaaactatgatcatcgatgtggtcggcaaaaagtctgcaagcgagacaaaaatcaaagaactctatggtacactttgtaaagaacgtatattccatttgactgaaaatattttcttctactaactgatacgtgtttacatgtggcacctgtaagaccaaagtgaagacatgaattaagagattactcaagagaaattgattttagtagataaacaaggttttttgaaacaatttgctcccttttgatcacaagagcaggatttttggcctaaagcatctagaaaactgcagtcttccttttcagtgcatatccatggagtagtctacaaccattcaccactgtgccaggcatagggaattcaagagcaacaaggtgaagaaaatcttaatcagctgattgagaatccattttatggaaagatccacctctttggggaaatggacttgatatttagaaactaaaacaatataaaaattttcaacaatagaaggacagaaataggatatgaattaaacaccaagcctgtggtaaatttgctttcagtgaaaaagatgtagaagaggaaaaaaaaaataaggaagagacgaaaggagaaagaaggagcagtggacgtagctgaggagaattatttccaacttttgaaaccaacagttgaacaattgagacttatggtggtttagcactacagtcaaaacatcttgtctcccaccccaacttctatgacctaaataaatgcagagagatagcatatttatggattacaaaactctatattgttaaaatggcaatgctgcccaaattcctcccaagattcaacacaattccaatcaaaatttctataagcattcttataaaaattgacaagctgattctaatatttgtatgaaaattcaaggaacctagaatagccaaagtaattcgaacaaagaacatagttgaaggacttactctatttgacttcagtacttactataaagctatagtaattcgttctgtttaatattatggtaaaggtaggcatatagatcaatgaaacagaatacagtccagaaatagaccagctgagttttgacaaacaagccaaggcaactcaatgggggaaaataaagtctttttaataaatgtcattcaataaactatccatttttttaaaaaaaatcaatcctactccctaccatacacaaaaatcaactaaaaatatattccacatcttaatgtgaaatgtgaaactatgaaacttctagaagaaaacacaggaaaaatatttgagatcttaaggcaagcaaagatttcttagatgtgacaccgaaatcactatccataagagaaaaaatgttggtaattgaactttatcaaaatttaaaactttaactctttggaaagcaccaataagaaaacaaaagactcataaaaatatttacaacatatttatctggtaaagaactcacatctaaaatacagaaagaatgcttataactcgacaaaatgtaaacagacttttgaccaaagtcaagatatgaatggacaatcaacacatgaaaagatgttcaacatcatttgttatgacatatgtatacactgcagattaaaaccttaatgagataccactacacgcccattagattgcctaagattaaaaagatcgaataatacaatgagcctgagattcacttaaaaataaaaaaaataataaaaaaaaaagatcgaacatactaatctttttaccaagtgtttgtgagtatggggaagtggaactcatatactaatgaggggaatataaaatagtacaataatgtggtttgactgtgtccccacccaaatctcatcttgaattgtagttcccgtaatttctacatgtcctgggagggaccctgtgggaggtaattgaatcatggggcgattttccccatgctgttctcatgatagtgagtgagttctcacaagatctgatggttttataagcacctggcatttcccctgctggtactcattctgtctcctgctgccctgtgaagagaccccttctgccatgactgtaagtttcctgagacctccccagccatgagaaactatgagtcaattaagcctctttcctttataaattacccagtctcaggtatttcttcatagcagcatgagaatggaccaacacatccaaccaccaccaaaacaatttggcagcttcttaaaatgttaattatacacctaccttgcaactcagtcatttcacttctaagtatttaaccaaaaggaactaaaatgtacgtgcacacaaagattgcacatgagtgttcttagcagctttatttatgatagcccaaactggaaactatttatcaacaggtgaatagttaaataatggtatcatatcatacaatggaatactattcgttaactatagtgatgaactattgacataagcaaaatggccaaatcacaaaatcattatgagtaatgaaagaaaacagacaaaaacagacaatacagagttaacaattcattcctgggcatgaacccagagaatgcatataaccactaaaaacatttacacaggaatgttcaaagcagcattattcatatcatcccaacatggcaaaccaaccaaaatatccatcaacaataaaatggactttataaatagtggtatgttcccataatggaatattacacagcaggggtccccaaaccccaggccacacagaccagtaccagtttgtagcctattaggaaccaggctgcacagcaggaggtgagcagtgggtgagcaaacattaccacctgaacttcgcctcctgtcagatcagtgatggcattagattctcgtaggagcacaaaccctattgtgaactgcacatgcaatggatctaggttgcatgctccttatgagaatctaatgcctgatgatctcaggtggaataattttgttcctaaaccatcacctcccccaacccactgtccatggaaaaattgtcttccacgaaagtggcccctggtgtcaaaaaggttggggactgctgttatacagtgaacaaactacctctacatgcaaaaacatggaacattacaaacataatgttgaatgaaaaaagatagtcaccaaagagcacaaaagttcaactacatttatataaagttcaaatacaggaaaaactaattcataatgttaaaaattatgatagtgcttactattggggtgaagtggatagtgactggaaaaagcacaagaggtgtgtctgaagtgctggtgatgttctattttttttatcttggtgctggctacaagagtgtgttcgctttatgaaaattcctcaaatgtacacttattatttggtacatttgtctgcatttatgttatatgtcaataaaaaatgtaccctgtaaaatcatgttttatggttagatgatgcagttgaaattgaaaatgatgggttttgtggaaatacagatgttcagccaacaggaagaaaagtgacgtatacttggagttgacaggatattactggagataaatatgtcattccttacaacagtcacagataatgataaaggcaaagggaagagaaagctaaagaaggaatcttggtgaatgtttacctgtaggtgttggaagaagaaaacaaagagatggaaaaggaccaagacatgcatgcacatagaagccaggctaaagaatgcttcaaagaagagacaggggcagctaatcatcaacacaaaagcagcacagtggttaagagtgtgggctttggagccagaatttctggattcaaatcttccaattttcatctataaaatggggctattagttgatactacttca

SEQ ID NO: 97433 - DNA, 30148 bp, Homo sapiens
cggatgatgaagtcagggaagaagcagcttgggcctcctgcctgggcaccctccatagatccctctccacctcctgctgcatccaaagccaaggctgcctgcccttcctcccttcctctgctttcaccaaaactctgggcactggactgcttgttccctggctcaccgcctggaggaaacagaaaggcttcattctcttactttccccagccccctcgggggtataccctggcaaatatgggggtgaggacagagaagctcagttcattacttcctgccctgaacttgggcaccttgaagatgcttctgccccacctactcaacctgttgttactgttctggtgcctcctcttcaccagactaagcttaatccccagcatccagcaagtgcccggcacgtggtaaagggattgtggcagaaatgaacgcaaggtcatggccaggctccccgaggtgggagggcagtccctaacagccacggatgcctggcggggcgctcactccacctcgccgccccgcctctgagggcgtggtcttgccccggacaccagtcctggggagggggtgtggtcagggcggggcatgcaggccacgcccccggaggagtcacgtagctctgcgacatccgcagcctcatttaccagagggagccagggctgcagcctcatctgtttgcggatcagaacccgagctgtgcttgtggctgcggctgctaactggctgcgcacaggtaaggccaggcaaggcgggagccactcaacatctccgcttcatttccttggctcttcccctgccatcctcgtcctgctacctgggactccgggatgtgccctttcgaccctttcctaacatctttgctcctttccgcgtacttgaaaccccatggctcaacctcttctgttctatccctcttcagctctcccagctggacctcagcttttccaatcccaaatcctcctctacttgttggatttttccttggagtctgtctctcctacccagagcatttccttctcagcctgctccctctcctcctaggctaggtcctctctccagttctcccgccttctctgccccccggtctaggtctctcccgctgactggttagcctgcatcaccactagctcccctcagtctcatctctctctcaggctctctactcctttcagccttggtcctctgccctcccgtctgggtgtctgagttgtggggaattgaagtgcttcctattgctatcctcctgccaaacaggtgaagtgcttcctgggcacagagatgacccggaggtgtcactagccctagtctccacacactaacacagctgacccgctgggccctctttcctacatcactgcagccccactggggccaacctctggtactgggtgggaataggcaataggcataggcaggcaggtttggagtacagaaaaggagaagctgcaggagcctgtgactggtatttgtgccactcctactccctacctgttcttccaaccttttcctctagaagctgagagaagagggtggcaataagtacttttgcctcattctgaagccttggaagtaagtacactttccctaggggtcctgtggaggatgagaaaagggaagctggaaaggccaggacttttgcctacctcaacaagggaccaagttcagtgaaagaagggttggcatccttgattgggcagcagatttatcagaagagctgtggcttcagggctgctcacctccccacccccaccctgcatctttccccagggctgggaaggatgcctaccagggacaaaaggagatgtgggaactggagccctaagcttgctagctgtcagaaggactggtgccacttgatgcccaggactcatgccaaggactgctgccctgttcccagccccttgcttgatggggaggccatttggcccatctggccaggagaggcagcagagggtgaggtctggcttttttatcttgtctccactccagggagctgtcaccatgcctcactcgtacccagccctttctgctgagcagaagaaggagttgtctgacattgccctgcggattgtagccccgggcaaaggcattctggctgcggatgagtctgtaggtaagtggacatctgtagccaggtagggtacaggtggctaggggaccctggggatgttctcactgcctctctttgtttgcccctaggcagcatggccaagcggctgagccaaattggggtggaaaacacagaggagaaccgccggctgtaccgccaggtcctgttcagtgctgatgaccgtgtgaaaaagtgcattggaggcgtcattttcttccatgagaccctctaccagaaagatgataatggtgttcccttcgtccgaaccatccaggataagggcatcgtcgtgggcatcaaggtgcagcccctggccctgctctgaatggaagctgggtgtgaaaataagcttgtgtaggaggggtagcaaggagaatcctgcctggattcaaccctctgcttgtacttcctctacaggttgacaagggtgtggtgcctctagctgggactgatggagaaaccaccactcaaggtataggatgggtgggcttgaggaccaaagaggtgttagatagttgatgctggtaaaagaggggcagagtaatgaggttggcactgtgcttgcagggctggatgggctctcagaacgctgtgcccaatacaagaaggatggtgctgactttgccaagtggcgctgtgtgctgaaaatcagtgagcgtacaccctctgcacttgccattctggagaacgccaacgtgctggcccgttatgccagtatctgccagcaggtgtgtgtgttgggagggtggtgagctaggtgccctgtatgcctggtggggagagagtcacaaggctttcttcatctcccctactgcccctcccaagcatctctgctcttgcctgcagaatggcattgtgcctattgtggaacctgaaatattgcctgatggagaccacgacctcaaacgttgtcagtatgttacagagaaggtgagtccacacctgggcacacaaacatactgcagggacagctcggcaggagtgtctgttccccagaacccccagcttagatccaggcacactttcccctagcactttttcacttcatcccggcacaggcctgtgatctgagcctgtactgagccctcacagtctgtgcccatctacccctacatagggagcatcgagcagtaaccagtgggggcccagacccttagtaaacctcctctaatccccacccaggtcttggctgctgtgtacaaggccctgagtgaccatcatgtatacctggaggggaccctgctcaagcccaacatggtgaccccgggccatgcctgtcccatcaagtataccccagaggagattgccatggcaactgtcactgccctgcgtcgcactgtgcccccagctgtcccaggtactacccagctccctaacctgctcctatccctaaggcccatcttcaggtccttcttgtggccttcaggggttccctatcctggaaaaattgggagtgaccagtcagtttgtcttctctcctccacactaggagtgaccttcctgtctgggggtcagagcgaagaagaggcatcattcaacctcaatgccatcaaccgctgcccccttccccgaccctgggcgcttaccttctcctatgggcgtgccctgcaagcctctgcactcaatgcctggcgagggcaacgggacaatgctggggctgccactgaggagttcatcaagcgggctgaggttgggagctacaggtggtggtgggtgggggcagcacccagaggctatagcctgggcagggcttggcacctgtgggctggctcagcctgcttactccacgctcccttttgcaggtgaatgggcttgcagcccagggcaagtatgaaggcagtggagaagatggtggagcagcagcacagtcactctacattgccaaccatgcctactgagtatccactccataccacagcccttggcccagccatctgcacccacttttgcttgtagtcatggccagggccaaatagctatgcagagcagagatgccttcacctggcaccaacttgtcttcctttctctcttcccttcccctctctcattgctgcacctgggaccataggatgggaggatagggagcccctcatgactgagggcagaagaaattgctagaagtcagaacaggatggctgggtctccccctacctcttccagctcccacaattttcccatgatgaggtagcttctccctgggctctccttcttgcctgccctgtctcctgggatcagagggtagtacagaagccctgactcatgccttgagtacataccatacagcaaataaatggtagcaaaacattctactttgcctgtctgttttacacatcaaattcccacctcccagtttctgatctctgctaattctatctctgggccctctgactctggaggtggagagggtgggatttgagtcttactgggcttcaagttatggaggaagggcacatgcagtcaccatccccagctcaggctcttgctctcttgatgtccaagtctggagtggggcaatgaggaagactgcaagtcttctagggactgccacatcagtggcactgggctgcagctacagaagtatggagtgaggccaaactggcaactcctgaaggcagatttgtgcaaggctcaaagcagggaggcagcaagacaggctgggataagagtgggtgggagtctctcccatctcgcagtgttaagcccagctgggacctggtaccttccactagggtgagccacaccagtaagggcaagcgagcacctggactcccgcccaaagaggaaaaccaaggctctgcgggctgccagggctgagcagggcatctaggaggttgccaagggctatggcccattttcatttggggtagaagtgggcacaaagggagccaattggagggtctgggtaaggacagctctggtgaggcctgatgctgaactttaaccactgggctgggttgtgaggtaggctgagaacctgggtctaagcagataaaaagaagagataacaagctgcgtgtgttctgtgtcaactggggaggctacaaatgctccaccctgtgtggcctgactttataataacaaaaatagcttgcacatagcaccaaccctgttctaatcactttatatgtactgacacatttcatacaactctataaagtaggtactattactatcatccctattttaatagagaaaacaggcacagataggcacagaacgatcttctcacgatcactcacctaataagtgatgaagccaggatttgaaccgcagtgatcagcatctagagtctgggctcatgacttttcaagatttttaagtgaagtattctgagttttccaagttggaaatgaattaaaacgtattttaaaatagcgagagagccaattgtgctaaaacatactagcttgctacctccgtgtttgaggctttgaggagagggcaccctaagaggagttctacgataaggataataagaccgtgacagttgacgttgagggctttccgtgtgccaggctccttacaagaacggcctcatttatgtaaatatctccattttcagatgagcctcggagctgcctgtagttgcccagctagtatttaaggactgcagaggttgcgctcttgattgcggggctagaagtgtgttctacagggaagcggggaacttcgttccagcagcgccgaaacccgcacggcccctaggctgtccctccgcgcccgggtgacttcctttcagatccccagcgaagctcccagcggagccctcccacccctcgcccgcttgctcccgtctgcgggtctggagtagcgctcgcgattggccccgatcaccgccgcggtcctgccccctcgttgcagagattccgattgggtgaggctcacgaagctctgcccccacggtggccggagcagccggaagctagcatggcggccgccggggctgcggctacacacctaggtgcggtgggcttcgggtggggggcctgcagctagctgatggcaagggaggaatagcaggggtggggattgtggtgtgcgagaggtcccgcggacggggggctcgggggtctcttcagacgagattcccttcaggcttgggccgggtcccttcgcacggagatcccaatgaacgcgggcccctggaggccggtggttggggcttctccgcgtcggggatggggccggtaccctagcccgtttccagcgcctcagtcggttccccatgccctcagaggtggcccggggcaagcgcgccgccctcttcttcgctgcggtggccatcgtgctggggctaccgctctggtggaagaccacggagacctaccgggcctcgttgccttactcccagatcagtggcctgaatgcccttcaggtgagactgctgtgcgggagggtcgggggacagcccccccggcaaggtggagactcagtgacggccctgatgctccttcctgtagctccgcctcatggtgcctgtcactgtcgtgtttacgcgggagtcagtgcccctggacgaccaggagaagctgcccttcaccgttgtgcatgaaagagagattcctctgaaatgtgagttactggggatcagggctgcttttcgcctctgagctcagttcagagctgagttgggtgggaggagcgggggtgtaccataaacgcagttaaaaacttactgttgaaagacctctgaatgaacagtgtgtttggtcagaaaaaaactactttcaaattcacagtcactaaatagcaattttactcgtaagacaggctacctaatcggaagcagttgatgcccatcagggtataggggaagaggtgggatatagtggaaagaacacagagtttgaaattaaattggatttgcatataggccctatttagtttgtttgtttatttatttattatattttgagacggagcttcgctctgtcgcccaggctggagtgcagtggcgccatcttggctcactgcaacctctgcctcctgggttcaagcgattcttctgcaccagccacccgagtagctgggattacaggcgcgcgacactacgcccagctaatttttgtatttttagtagagacggggttatgccatgttggccatgctgctctcgaactcctgacttcaggtgatccgcatgcctcagcctcccamagtgttgggattacaggcgtgagccaccgcgcccagcccctattcagtttaacattaaacactttactggggtacttttttttaggtaccaagaatttaggaatgaataagaaattgataatggtttcaagatgttcataggtaggggagaaagataaaataaattacagtagaagtatacaagaaacagagattgcacttagtaaagagtattaaccatctgggaggaaagaaaggcagagaaagttttgagagatgtaattcttaagtcggatttttaaaggatgtgtaggaattcaggttaagtgggaaaaggagggagagaatttcaggcaaagttaatagcatgagacagtataaggatagctgatagttgttgctcgctgtgtgccagaaactaggtgaagcattttatatgtgttgcctcatttaatcctttctaatgatatgatccccattttataaatgaagaaactgagccttagagaatttaacttgtgcaaggtcacacagctagtaagagatggaactgggatttaaatccaggcctgactgattccagtgttcaagcttttaaccaacaaactatactcctgtgtgaaagtgtggcggggtgaatcagcatattgggggacctatgagcagttttgccttactggaatgtgtagtgaaagactgggaatgactggagatttgggctgagtctagagcatgaggcatctgtgtgccatttacttttttagttctttagccttggtgaaaacttttcttttcttttttttttttttttttgagaaagggtctctctttgttgcccaggctggagtatggtggcacgatcagggcccactgcagccttgacctattgggctcaagcgatcctcccatctcagcccacctgccttaatagctgggactacagccgcacaccatcacacccagctgatttgttttggtatttttagtagagatagggtttcgccatgttgcccaggctggtctcgagctcctgggctcaagtgatcagcctcccaaagtgctgggattacaagtgtgagccaccgcacccggctggttaaaacatttttttaaaaaaatgatatttcgtatggttcagcctctgtacacacacaaacttctggttttctttcttttttttttttttttttgagatggagtttcgctcttgttgcccaggctggagcgcaatggcacgattttggctcactgcaacctctgcctcctgggttcaaacgattcttctggctcagcctctgaagtagctgggattacaggcgcctgccaccacgcccagctaattttttgcatttttagtagatacggggtttcaccatgttggctaggctggtctcaaactcctgacctccagtgatccaccagcctcggcctcccaaagtgctgggattacaggcgtgagccaccatgcccagccaaacttcttgttttctaaacaaaaattggactatccctcacaagttagtttgaaatttgattgttttcagtttatcatggatttcttcatatttgataacacagtgttcagtaatatgggtatactgtaaacgtatagtataggcaacacgtataaagggtgaccaagagtatagaatctgggatcagagagctggaattcaagccttattctgccacttatttgtgtaaatttgagtaaggttgttaacttctctaaaccttggtttcctcatctgttagacggaaatagtaatagcgttgttcatttattcaacaagtatttactttgtagctatgtcagatacagttctagttactagagatatagcagtgaacaaaacagacaagaagaagacaataaaaaagacaaagctggatgtggtagctcacacctgtaatcccagcactttgggaggccgaggcaggcagatcacttgagatcaggagtttgagaccagcccggctaacatggtgaaaccccatctctactaaaaatacaaaaattagccgggcgtggtggcgggcgcctgtaatcccagctacttgggaggctgaggcaggagaatcgcttgaacctgtgaggtggaagttgcagtgagccaagatcccaccactgcactccagcctgggtgacaaagactccatctcaaaaaaaaaaagaaaaaaagacaagtaagtcaaatgtatgttagatggtgacagaagaaaaatagagcaggacaggaggagagggaattttcttgaggaatgggaggggattgcagttttagatagggtggacaagggaggtctcattgaaaagaggacattcgagtaaatacctaaaaggcgagggaatagactgtgcagatatctgggggaagagcatcttggcagagggaaaagcatgtctaaggtcccgagttaagagcaagtgttgtacctttcaggagcagtgagaatctccttgtggcttcactggagtgaatgaggaagagagaaagaggaaatgaaataaaaccagaacagtagaagggggctgaatcacttagggcctggtagatcactgtgagaatttgcattctaggcttttattctagataagaagggaagccattgaaggttttttgtttctttttttaaacatgactaccattgtcacacctaactaagttagcagtgattccttaatatcacctaattctcagtctgtatttagatctctccagttatctccaaggtatcctttcacagatggtttattccatcaggatcaataagttgcatttgtctttttgtcacttttattttatgtcagctccccccaccctacccccatacatttctttcacaccattgatttgttggagaaaccaggtcatttgttttatagaacatctcacatttgggatttggcgagtagcttcctcacagtttaatttaactcattcctctagcatccatattccttataaactgggagttagatctagtggtttgattaaagccaggttcaattttttggatgagaatacattgtaggtggtgcagtgtacttcctattgtgttgtatcctgaagcacttaatggctagttgttccattttgggtgatgcaaagattatgtagtgagttcaggtattgtcagcctgatctctatattttagagtttctcatcaaccttttacatatttttagcatctatttgatcatggaatccatttcattagcagtcacaagataatgctttttttaatttttattttttttagagacagggtctcactctgtcacccagactgctgtgcagtggctcaatcatagcttactgcagccttgaaatcctaggctcaatcagacctcccacctcagcctcccaagtaggtaggactactggtgtgtggccaggcacagtggctcacgcctgtaatcccagaactttgggaggccaaggcggtggatcatttgaggtcaggagtttcagaccagcctgggcaatgtagtgaaaccccttctccactaaacatacacaaattcgctgggtgtggtggtgtgtgcctgtagtcccagctactctggagtccaagacaggagaattgcttgaacctaggaggcagaggtttcattgagccaagattgtgccactgcattccagcctgggagacagaacgagactctgtctcaaaaaaaaaaaaaaaaaagtaggctgggcgcggtggctcacgcctgtaatcccagcactttgggaggctgaggcgggtaaatcacttaaggtcaggagttcaagaccagcctgctcaacatgggaaaaccctgtctctactaaaaatacaaaaattagctgggtgtggtggcacatgcctgtaatcccagctacttggaaggctgaggtaggagaattgcttgaaatggggaggcggatgttgcagtgagccgggatcccactgttattctccagtctgggcaacagagccagattccatctcaaaaaaaaacccaaaaaaacaaaaaaaaaaaaaaaaagaaaagaaaaagtagacaaggggtcctttttttttttttttttttgagatagggtctgacactcaggctgaagtgcagtggcccaatcatagctcactgtaaccttgaactcctgggttcaagtggtcctcttacctcaagctctcaagctcccaagtagctgagactacaagaatgtgccactgtgcccagctaattttttatttattttatttaatttgtttatttatttatttattttgagacagagtctcactctgtcacccaggctggagtgcagtggcgcaatctcagctcactgcatcgtccgcctcccgggttcaagtgattctcctgcctcagcctcctgagtagctaggactacaagtgcacagacaccatgcctggctaatttttgtaattttagtagaaacggggtttcaccatggtggccaggctggtcttgaactcctggcctcgagcagtccgcctgtcttggcctcctaaagtgctgggattacaagcgtgagccagtgcacctggccccagctagtttttaaattttttgtagagacggggtctcactgtgttccccgagctggtctcaaactcctaggcttaagcaatcttcccacctcggaccctaaagtgctggaattacaggcatcagccaccacacctggccaaattagtgacttttacaattctgtcatttcttctttctggaagaaatgtatgacctggaattcttttataaagaaaagaggaactttttcaataaattttaggtttagcttgtcaagtttcaggaggcaaaaaaaatcccttcaggattgccttacatgtatatattaatttggggagagttgacatctttataatagtctttataatatgacatctttataatattcatctaggggccttgtatgctattccattttgttcagatattttatgtccttcagtaaagtcttgaagttttcttcttatagttttatacatttattcctgggtatttttatactttattgttaatgtgattgaggttttaaaagatgtttctaattggatattgctggtatttatgcgggtattgattcttgcatatccttgtatctagtcatcttattgaactgttgctagttctaatagtttttcagttggttctctgattttcttgagaaataattatgctacttcaaagtggccattttatctgtttctttccaatacttttaagttttctttctctttcttcacatattacattggtcaagaactttagaaagaacaatactgaataacaatgagaatagaggagatagcaggcatccttgttttattactaactttacagaattatgtttaatattttgtcattaagtgtgtggtttttattttttatttttttgagacaaggtctggttctattaccctggctggagtgcagtggtgccatctcaggtcactgsaacctctgcctctcaggctcaagtcatcctcccacctcaacctcccaagtagttgggactacaggtgtgcaccaccataactgcctttttttttttttttttgagatggagtttcgctcttgttgcccaggctggagtgcaatggtgtgatctcggctcactgcagcctccgccttctgggttcaagtgattctcttgcctgagcttcccgagtagctgggattacaggcgcctgccaccacacccagctaattttttgtatttttggtagagatggggtttcatcacgttggccaggctggtctcaaactcctgacctcaggtgatccacccgccttggcctcccaaagtgctgggattacaggtgtgagccaccatgtctggcacatacctggctaatttttgtattttttgtagagttggggtttcatcatgttgtccaggctaatctccaactcatgagatcaagggatccgcctgccttggcctcccaaattgctgggattacaagcatgagccaccgtgcccagcctgtgtattttgttttttatcaggaacattcactgaatttaattattttggggcagtgattggaatgaccatacagtttttctccttttgccyattaatgtaatgactattgaaatagatttcccagtgggaagacgtttcacgctgaaggaccagtgtgtgcagaggtgaaggcaagagctgcggcagatgggcgaaatgggtgtcatgtgtttgatatcatctwtgcagaaatcattagagttggctgcagctgcttggtctttttctgtaaacagccatcttgctgtcctcagatgctggacagtgttaggtctgggaaggtgggcagaggcatgatgcttgcccttttcaytgtgctacttcttatccctcccagacaaaatgaaaatcaaatgccgtttccagaaggcctatcggagggctttggaccatgaggaggaggccctgtcatcgggcagtgtgcaaggtatgggaagggatgagcacaccattttaatgtgaagccctctttttccttctgatctctaagtgcatagttcccatgctttggcttacttccaaaacctctcttggaatgctgggaatgaggaactgtgggattcagcccagtccactgagggccagagaggttgattggcttacccaagcctgaccactgtgtcagctgaatgtgagtgaaggggtgggttaggcattctttggggctggggggagatggaatggtgttttgctcttggtgtaccacctgttcttgcccccagaggcagaagccatgttagatgagcctcaggaacaagcggagggctccctgactgtgtacgtgatatctgaacactcctcacttcttccccaggtaaggtaacagagaggctgcgactttgccttatcccttcagctcgtggactcctgggtcacctccttcttgcatcattgctacccatttcttccatttgctacagaaaactctccaaaaaaaaatttttttttttttgagacggagtcttgctctgttgcctaggctggagtacagtggcgggatctcggctcactgcagcctccgcctcccgggttcaagtgattctcctgcctcaacctcctgaatacctgggattacaggcatgtgccatgtaatgtatttttagtagaaatggggtttcaccacgttggtcaggctggtctcgaactcctgaccttgtgatctacctgccttggccccccagagtgctgagattacaggcgtgagccaccgcacccgtcctccacatatttttaataaagaatgctggctgggtctggtggctcacastgtaatcccagcactttgggaggccgaggcgggcagtttgcttgaactcaggggttcaagaccagcctgggcaacatggcaaaaccccatctctacaaaaaataaaaaaaattagctggatgtggtagtccctgttacttttggaggctgaggcagggggagcgcttgagcctgggaggtggaggttgcagtgagctaatatcatgccattgcactccccatctctactaacaatacaagaatcggccgggtgcggtggcacatgcctgtaatcccagcactttgggaggccgaggcaggcggatcacttgaggtcaggagtttgagaccagcctggtcaacatggtgaaaccccatttctactaaaaatacaaaaattagccgggcgtggtggtgggtgcctgtagtcccagctactcgagaggctgaggcaggagaatcacttgaacccaggaggtggaggttgcaatgagccaagatagtgccactgcactccagcctgggcgacagagtgagactctgtctcaaaaagaaaatttataatcaaatatttaatttttataaaagcactaaagaaaatgttaatgaacgtccccatccccacccccagctcacaaactgcagtgcagtagcacggtgtgtacttccatggttatactccattcccttttggcccaaggcaaccagattttgtgtttgtaattttcttgcttttccttagagtttgatcacatatgctgtatctctgtaaacaatgtatttaattttacatttttgaatttrtataaatggtggcttataacacatgttcctctgccacttttattttattcccttcatgtggcagagcctggtgagagaatcatccataattatgtagttgaatctatgtatcattgtataaacataaacataatttacccattctattgctaatggacatttggattatttctaggttttactgttagaaataatgctattatgaatacttgtttctttgccatgtgccatttttatatcagactctccagttgtctgtttattccgcttttcttgctcagcatgccatctctgagtttccatttcaccattttaccagcccctgaagagttagatgctgcctggacccatgtcaactgggaaaaagaagagaacggagacaaatgaaaatactcaatatatactcatagctcagaaatgctgagttaatagctcatgaatctcaagagaggtgcaaacctgttggtcattggcaaaggggcagattyggaacagtaggagccagggtgctttttggctttcttttctgagccatgggcattctgtctcttgctcacccccacaggacatgatgagctacattgggcccaagaggacagcagtggtgcgggggataatgcaccgggaggcctttaacatcattggccgccgcatagtccaggtggcccaggccatgtctttgactgaggatgtgcttgctgctgctctggctgaccaccttccagaggacaagtggagcgctgagaagaggcggcctctcaagtccagcttgggtagggcaccaggctctgccacatgaagggagaggaaatgaattacatggggcaggagggaaatctgcatgccaacttctttctcctttcttctctagtctcaatttttttcttatttattttatgttattattattattattattttwtttagttatttattttgagacggagtctcactctgttgcctgggctgagtgcagtggcactatctcggctcactgcaagctccgcctcccgggttcacgccattctcctgcctcagcctcccaagtagctgggaccacaggtgcccgccaccactcctggctaatttttttgtatttttagtagagacggggtttcactgtgttagccaggatggtctcgatctcctgacctcgtgatctgcccgcctcggcttcccaaagtgctgggattacaagtgtgagccaccacacctggcctatttattttattttattttttgagacagagtcttgctctgttgcccagactggagtgcagtggcgtgatcttggctcaccacaacctctgcttcccacgttcaagtgattctcactcctcagtttcctgagtaggattacaggtgcatgccaccatgtctggctaattcttgtatttttatttttattttatttttttttgagacggagcctcctgtcgtccaggctggagtgcagtgacgtgatcttgtctcactgcaacctccgcatcccaggttcaagcgattcccctgccccagcctcctgaatagttgggattacaggcgcccaccaccatgcctagctaatttttgtatttttagtagagacggggtttcaccatgttgaccaggctggtcttgaaatcccaacctcaaatgatctgcctgcctcggcctcccaaagtgctgggattacagcgtgagccaccacacccggccgatatttgtattttcagtagagatggggtttctccatgatggccaggctggtcttgaagtgctggcctcaagtgatccgtctgcctcagtctcccaaagtgctgggattacagacatgagccacagcgcccggcagctttttcttactcagtgttcctcatcccagttttgtcctccttttggttccatgatggaaagcagccccattccagaggagaaacaagttcagctcagctgggagtayaggctgcccctcttctttgatccacaagagcctctgacttccctgactcctgtttctgtaggctatgagatcaccttcagtttactcaacccagaccccaagtcccatgatgtctactgggacattgagggggctgtccggcrctatgtgcaacctttcctgaatgccctcggtgccgctggcaacttctctgtggactctcaggtgagaccgggagcaagttgaggagtccttttcwatgtctatacatatttacaagtgcagtctgttcctccatctcttagagcttgctgatttgctaggaatttcctgtgtgtatatgtatgtgagtgtcataagggtgggtactgggggtgcgtgtgtgcccttgtctgtgtccatccatccattgagggcagattctggtgtctttacttccttggcatcctattgagagagtttgtcagtgcttgttaacaaaccaccttcctatagctccctctagacctgtactcaccaattgtgcttagatgttaatgccatgacccatctttttttttttttttttttttttgagacagagtcttgttctattaccaggctggagtgcagtggtgtgatcccagctcactgcaacctccgcctcccaggttcaagcgattctcctgactcagcctcctgagtagctgggattacaggtgcgtgccaccatgcccagctgatttttgtattttagtagagacgggttttcaccacattggccaggatggtcttgatctttgcccagctgatttttgtattttagtagagatggggtttcaccacgttggccaggatggtctcgatcttttgacctcgtgatccacctgccttggcctcccaaagtgctgggattacaggtgtgagtgatggagcccagcagagccattcttaaggaatttagtttttagaaaaatgcttcctgaaatttgttattgtagtaacaataaagatgtgaagggccaggtgcggcggctcacgcctgtaatcccagcactttgggaggctgaggcaggcggatcacgaggttaggagatcaagaccatcctggccaacatggtgaaaccccatctctacaaagataaaaattagctgggcatggtggcgcgtacctttagtcccagctactcgggaggctgaggcaggagaattgcttgaacccgggaggtggagtttgcagtgagccaagattgtgccactgcactccagcctggcaacagagtgagactccatctcaaaaaaaaaagatgtgaagaatgtagctttctgtatcacgctgtctccttgtagggaaaacacgtgggagaaatttttatcaggtcttcctagtgggagtaattgcttctgaataactggcttgatttgatcttgtagacactgaattatgctgttctttgtttctctctttgtgtagactgttaggaaacctggtaaaatacgtgatttttaaagcacgtatttagtttattcagtttacccttggctttgctattttcttctgcaattattttctctcagccctgattttgtctcttatatgttgccttgtcctgattgtgtcttttttaaggcacctcaaatcttttttgggagaaagtagaatataaatctaaacaaagtaaccactccctgtttgctctacagattctttactatgcaatgttgggggtgaatccccgctttgactcagcttcctccagctactatttggacatgcacagcctcccccatgtcatcaacccagtggagtcccggctgggtgagcacctaaggatgagggtctttcttttctgccaggctagggagggaccctgacggctcagctgggtaggggacaggagttggaggtggattatatacagtgatggttcccaggttgggttggtccgaggagactgtggagattgaggctcctttttttctttttttgagacaaggccttgctctgttgcccagtctaaagtgcagtggcacagtcatagctcactgcagcctccaactcctggactcaagtggtcttcccacctcagcctctcgagtagctagaactataggtatgtgccactacacttggctaattttcaaaattttttttagagacaggatctcattatgttgcccatgctggtcttgaactcccctcaagtgatcttcccaccccagccccctaaaatgctgggattataggcgtgagccactatgcctgagccctaggttcctttttcatgatgctctgttgatatctccatcttcacacctatcatatccaaaagcatttattaaacgtgattcctagcactttttacaaatgaatgactaggctgggtctatctccctaaaagccatctaggagagaggctgtcacacacataggaaagacaacagcaaaagtacttgagggcagaatttgaattgacagttctgctgattgaggttgaataaccttgaagctagtattagagtttttcatttttcgggtggaaactaggaagaggaggtgtgactaagaactgtaacacaggcaaaccaaagtgagtatatctaattgtggaatctcagataccagaggcaggctagtgtggcccaaggattgtgagggggtggcatgtgaggccttagaaaattcctccgttcatttattcattcagcaaacattgactgagggactaccttatgacagtgctgagtagagaaaagaagggcatttcaggcaaagggaactgtgagcttagatgcagacaagtgagagagcttaggcattcaggaagctcagagtagtttagtgtggctgaaatgtgagtgagtgaccaaagatgaagccggttaggcaggcaggagccaggtcataaaggaccatgttaaggagtttgaactttaacctgatatgggtggctagtgattgagggatattaagcagggaactgacataaggtcagatttctggtttgcataaaactatctgtagtaatatgggtacattgtgggagtggccaagaaagctgtcgtagacagtcaaggggcctttgaggagggagaattcgggggtgttttggagctaaggactatgtttccatcggtatggcacatctcgggagaacattctgaagccctttactagagacaccctggacaggaggatatcctaatgattgttagttggggaatcagtcccagagtgagtgaccagcaagttagaggccgacctgggactaaggtccaggtccagcatgttttgatattctgctttccctttataccacaggatccagtgctgcctccttgtaccctgtgctcaactttctactctacgtgcctgagcttgcacactcaccgctgtacattcaggacaaggatggckctccagtggccaccaatgccttccatagtccccgctggggtggcattatggtaatagtcacactrcgcagaccccagagcccatgcttctgggacaggcaggtgtccctgaaactgtgttccttctgttttccttctggtgtcctccatggcccagcctgtgggaggggcaggcaccaggaaggtgagggtgctatgtgctcatgcccctcttctgccggccccacttttgtttccgccagtgttttctatactgtgaccctttgcccttacctaggatcattctgtgtccatcttagatcttcgccttatttgtgggagtcttgcaaggttgggagccttgtctcccttgttagactggaagtttctcatgggggagaattctaaaatgggataagaaaaaaatatgttctacaggactttcaagggggtaattgggataatgtatttaatgctctccgtagtaggtactcaaaaaatattagctataccatgaggtttatagcttctaaagagcacagaatatgttttccttttctctccagagtgcctagggcagagctgtgcaagggcctggtatgaygttgtggcaatctcattccccctttcaggtatataatgttgactccaaaacctataatgcctcagtgctgccagtgagagtcgaggtggacatggtgcgagtgatggaggtgttcctggcacagttgcggtgaggtcctggatgatccacttggggacatagtctccttggctgtagaggggagttgcaaagtggaatcaagtcttacctggcagggatatcttggctgtgcctagagccccagggaaaccaagaaaagtttctaaggatcccatcatccttctaagaaggactagtaggtgacaaaatcatttatttttttttttgagacggagtcttgctctgttgcccaggccggagtgcagtggtgccattttggctcactgcaacctccacctcccgggttcaagcaattctctgcctcagcctcccgagtagctgggactacaggtgcccgccaccacaactggctaattttttgtaattttagtagaaayggggtttcaccatcttggccaggctggtcttgaactcctgacctcgtgatccacccgcttaggcctcccaaagtgctgggattacaggcgtgagccactgtgcccagccagcaaaaccagttttaagaaaaatagactcatgaatgtcaggtccatggagtgtgattagggctgcttaagaaaatagctgttaattcttatgctgcctgatggattgagagtggctgcctgaggctctgtgttgaggattctaaggctgtatctgggctcattaggaaagagtattcttctgattgactagcagtgtctctcacggatgcaggcttagagaagcacagcacatgtgccttggcaaaggcagtcctggatcatcccttaatgctaagtcccattggccccatttgttcaaagagagggtagaaaaggtgaaaggattaaactgagttggtgttatcagaagtattttagccatggaacctttttttaaaaaacaagatcttggaaatctaatgtagaaacaggtaaaagcagaaacacctgttgaagcagcgtttggggccaacttgtttggtgttgccccttatgcccccaagaccctgaggtacttccctttaacccctatggttctgggtaagattgaaaatcactggctcaggacagatatttgagaaatcttagccatgatctcccgccttgtggtctcagccaccttgatcttactccgatgttcctacaggttgctctttgggattgctcagccccagctgcctccaaaatgcctgctttcagggcctacgagtgaagggctaatgacctgggagctagaccggctgctctgggctcggtcagtggagaacctggccacagccaccaccacccttacctccctggcgcagcttctgggcaagatcagcaacattgtcattaaggacgacgtggcatctgaggtaagcaggcaggggatggattctgcagcttgggactggagtagccagagagggccagagtgtggtgagaccagagagcctgtgaggtccatggtatgtgtgggcttgccatctttagtgtcccagccttcctctagayggcagtaccagcccccaagcaggagtgcagatgagagtgcgaggtttcaagctgaccctaggaaaataaaccatatccctgtagaaagacttccatagatcctggatgaactccaggcatcttccttggtagatggaaggcacagtaaggcccagcaccctttccaccaatgcctaggacttactggtataccctcttgtcccttctccttcctaggtgtacaaggctgtagctgccrtccagaagtcggcagaagagttggcgtctgggcacctggcatctgcctttgtcgccagccaggaagctgtgacatcctctgagcttgccttctttgacccgtcactcctccacctcctttatttccctgatgaccagaagtttgccatctacatcccactcttcctgcctatggctgtgcccatcctcctgtccctggtcaagatcttcctggagacccgcaagtcctggagaaagcctgagaagacagactgagcagggcagcacctccataggaagccttcctttctggccaaggtgggcggtgttagattgtgaggcacgtacatggggcctgccggaatgacttaaatatttgtctccagtctccactgttggctctccagcaaccaaagtacaacactccaagatgggttcatcttttcttcctttcccattcacctggctcaatcctcctccaccaccaggggcctcaaaaggcacatcatccgggtctccttatcttgtttgataaggctgctgcctgtctccctctgtggcaaggactgtttgttcttttgccccatttctcaacatagcacacttgtgcamtgagaggagggagcattatgggaaagtccctgccttccacacctctctctagtccctgtgggacagccctagcccctgctgtcatgaaggggccaggcattggtcacctgtgggaccttctccctcactcccctccctcctakttggctttgtctgtcaggtgcagtctggcgggagtccaggaggcagcagctcaggacatggtgctgtgtgtgtgtgtgtgtgtgtgtgtgtgtgtgtgtgtgtcagaggttccagaaagttccagatttggaatcaaacagtcctgaattcaaatccttgtttttgcacttattgtctggagagctttggataaggtattgaatctctctgagcctcagtttttcatttgttcaaatggcactgatgatgtctcccttacaagatggttgtgaggagtaaatgtgatcagcatgtaaagtgtctggcgtgtagtaggctcttaataaacmctggctgaatatgaattggaatgawacaaagtctgagctctactctttctgcattcacgcgtaagtaacagtttcctggtgtttgtcctcctgtgcccacaggtccactttgcttccacgtggccatgtgcccttcctagctggattgcccaaggctgttagcatctgctttttacctgagatactaattcatcaggtcaaaaaaaaaaaaaaaaaaaaaaaaaaagtcttgagcaccagctgcagggagccttctgctaggtacaggggtcctacagagaacaaagtaggcaggaccagtgctttcacagagctgagctttcagggggaagagtcagcggacaaataaaaataatttcacataatgcattagaaagacaaaaacaggctggtcagatggtgactgagggggaaggacttcagactgggtgtgagggaggccctttgagcagatgacatttgagctgtgactaggagaaaagaggccatctggggaagaccatccaagcagagaccctgagcctggaactcacgggcagaaaggctggaacacaatgagtaagcggagaggtagtcaggaccccactagtaccagtacaagaaagtgttagaaaaacagaatgaagcccagggcaggataccccgactcccatcccccgcgcccgtcgcatttcgggagggttgggccgggcggcgggcgggatcagcgcagggcccaccccaggggcggggccggggcggggcagtacctggggccccggccgggggcggggctgcggatgctcccacttcccccggctccagccggcgcaggcagcggcggcagcagcaggcgagcctcggccccgcaaggccatgaaggtgaagaagggcggcggtggggccgggacggcgacggagtccgctccggggccctcgggccagagcgtggcccccataccacagccgcctgcggaatccgaatctgggtccgagtcggagccggacgcaggcccagggcccaggccggggccgctgcagaggaagcagccgatcgggccggaggacgtgctggggctgcagcggatcaccggtggtgagcacccgcgagggagcgccgcccgcgggtgggaaggggagagggtgcgaggggccctcccggcgcgccaagccctggcccccgccccctttcccgcctcccctcccccaccgagtcccctctcctgtgtcccctgctctcccttctgccgccaggtctgagatctctgtgtacccccttcccttgatctctctctgtgcctccttcttctccctttcgagatttattccttccttttccaggggcccgtccccttttcccagcgtggaggtacgtgcggcagcagctgcaaccatagccctgtagctgtggagtctccagagcgctttgaggcccgtccctgcactaatgaagagaggggctgagtgcagcctgtcctcagcccccacgctggaggctaggtggaggctgagttacttgggaggcattcagactcttcatgtctccccaaccattaataccctcaccctgatcctccaggaagacttgggccattttcttccccgggaaagaaactgagcaggcagctttagtgtgttggctgtggttcctctcatggggagtggcataatgtccctccaagcctggactagcacctgtcctcttctgggggctctgtcatcaagggaggcttggtctccactgtggttaagagtttctgagctggactgcctgggttggagttccaactctgccatataattgtctgtgtgaccttgggcaagtaacctcacctctctgagcatgtcttttcatctgtaaaatggggataatgatacctttctcgtaagattattgtgaagataagtcctctgattctgtacagtgcctggcatctatgcatgctgtgtacattgggctctttgatcagtagtatttttgggccctacagggctgctcatagctgctgcctggagtcaaacaacttggctttcagggcaggggagggggtcatcataggcagggaacgagggctaggaaacctcatagcagaggctttggatgagcctcaaaggatgaaaggtgcatggagagacagtggctctccaccttggccacattcaccagcaacctgccctggccccctttgtgagaataactgttggggggggcctctctgtgggtatggggggcatgtattggagtggacctgagccctagagcttccaaagcagcagaacaccggactcccagacagagctgtggaggggagacagccttgagcctgtgctcctgggtccctgggggccaattcctctctccttactgagctaggcagcagccattcttagctgggcccccagagtactgagctcccttgcccaagcaggcatcaatggagagagggaggctggaccaggctgatgttgaagccagttgggctacaatttgcaatagcagcatttaggattcagcttagctctggggcagaactttctcagactgactgagtcctgagtaactttgggggtttattttgcaactagagggagcttccagctcatgtaccaccatttgtctcctaatttggaggaaattcatagcccttagagatggggcatctgtgaagggtaagtagaggaaagggcttcatgagaaccccttcctgtgcaggaattgagaacagagttccagggatttccaccctggcaccccttgcctggtctcttctgaccctaatcatgcaggtctgaggtttgctgttcccagattactgggccctgaatccagcttaggaagctatttgtggctgagaggaatagagcagttgtgttctgagcccttggccactctgccccttattctgacctgaccctgggtcccaggcctcatcctttctagaagagaaggagtggccgtggtgttctgagccatagatatccgtgttcctcacttcttctaaggacagagaggttgatagattgagtttgcagtagaagagactgaggttagactgcaggaagttgttcccaaatgagagaggctccaaaagttggagaatgggagaagagaaggccttacagggatctgggagttgggcactgggatcctgctccccactctgccacctccgttccctatgctctgtaccttctttctatgtctttatactggtgcttactttctgtgaaaatagggtgaatggggtgagataggggttgcccacttccattctctccccaccccacatgtgggctgtagtagactcagggccctgcctcttccccaagctgtataaagtccatgctgggccccagggtaccagatggctgccaggagggcttcctggaggggacagcgtcaggcttggggaagaagcagacctggggaagagaaaatgactttatattcacttcctgttcctgccccagaggaataggaggtggcccaggggcctggagggtgatttccaggcctctgtgggccaccaggggaggatgtgatgctgtgcaggctgacagcacgagtccctccctgcacctctcagctctttttgttgccagggcctccctgagcacttgaagttgctgctgcaagagctgtgagggttagatcaggccctgtagctccctgagcttcctcaggcagggcctcccactgttcttggttcccttcctgggcctgaggactccccttaccccttccacacccactgctgcacctgccacaccctcctcctggcctagcctgtgttcttctctatgggggtccaggactactttctccatggtggtggctcatagccagggctgcgtaaatgacctctaagggggttctctctgcttgctaagacttcctcccatttggagatcaacaaaggatgagagcaaagttggcctcctcccacctgccatatcccaggctctgggcttgagtcagcagagctttggttaagctgcttaagggagctgggctggtgtaagcttcttactgagaggagggggtttggaggagaggaggaatagggaaggggttgttcacctgccccagccccacccatatcagggaaagtccccttaacatcagcctcacctgatacatctagatgtcatgccaggggcagctgtggggtgagggtaggagtatcctccagagaaggacagtgactctcccaagacagagctgtgtggccccctttacaggtggttctcaaaggcagggtaccagagaagttgatacactgagttgcagtagaagagacaggtcagactgcaggaagttgttcccatatgagaagagaggctcccaccaggctggatacctaattctcccaaagtcatctagccagccttggcagagcggaggccagaatgaggaccctcaactccagagtgggagagagagtgttcaggaggtggccttgtcctctacccttctctgccctgcccttccctggcccccagagaccagtaggatggcactccttatcccctgttagatccccatggcggagttatgtctcttccacactgggggtgtaccccaagggcagggactgaggtccctctttccagagggcagtgatcccagggatgagaagatggtagctactctggggtcccacacaagctgacctggcagcaggggctttgcggccccttccttgctcagctgcctgtttcccctagactacctctgctcccctgaggagaatatctacaagatcgactttgtcaggtttaagattcgggacatggactcaggcactgtcctctttgaaatcaagaagcccccagtctcaggtgagtgggctgggtgggccattgatggggaggcagataggagctgcggagtgggctgcccagggaatccttgggccacagaggagtccacagagctggggcttggaccccagcattctcaggagtctgcaggcaggggggccctttcttttccttcccatatgtttctgaggctggacatcttgcgaggtcagccctaccccttcggtccctgccaacctgccctctgcagggctctctgggaactgcagtcctacgggtcccaggcctcagcatcctgtggcccggggaagcacagtggcgattgggaacatgcagacctagaacccctaggtggcactatttggccaatggtctgagccctcagtgtgccccggaatttcttggggagtttaaaaaaaatcagatagatggggacccaagggtagaaccctgggtggacaagggcccagcctgaagcccactgagccccagctggggtacattgcagaacggttgcccatcaaccggcgggacctggaccccaatgctgggcgctttgtccgctaccagttcacgcctgccttcctccgcctgaggcaggtgggagccacgtgagtcgctgggctatgggtggtggtgggggtgagggagagggtgtgagtgggcccttctcagcctctcgtaggggtggcctgtcctgagcctggctggctagttgacttcaaggacagacttagccctgcctccttttcttgctcagggtggagttcacagtgggagacaagcctgtcaacaacttccgcatgatcgagaggcactacttccgcaaccagctactcaaaagcttcgacttccactttggcttctgcatccccagcagcaagaacacctgcgagcacatttacgacttcccccctctctccgaggagctgagtgcgcgggcagggtcttctgggagtggggaagtgggggcgtctagagactgagctgcgggagggagagggacttgtgggtctgatcccatttctccccaccctggggctcttctgtgtctgccaccattcccatatcatccgtagagaaagaggctggggatatttcaggctgtttggctgtccctgtaccccagtcctgaagcccctgcagtggcgggactcaagctcctgacctttgcccggcctggctgggcctctcttgcagtcagcgagatgatccgccacccgta

SEQ ID NO: 97434 - DNA, 47593 bp, Homo sapiens
gataaatgaggtgaaatattaaccataggtgaatatgggtaaacagtataagggtaccatttgtattatttttacttttgtaacatctataggtatgaaattattcccaaataaaatgttaagacaatatatatagtttagctatggtgcattctgatgaactaacaaatacagaatttgttctagaagaatgaatagtatgctcattaggcagtttctctcaaatatcagatgtctcatgtgagtctttggtaaatactggattaaatcaattcatggttgaattacccagtgagtgccttaagtgccaatactcagttgttgattgaagagggatccatatgttttagataccaaatatgggacaaaaagcgttgatgttctgttgtgaaaatatgaaagcccaatttattgtgtgcttgttcaatttctcatgaagatgaatcagagaggtacttaaaggaagttaccaatattttctctcagggagccgtggaaactgtagaagtaattggacaggtgctcaggtatgatcccagtgttcaacagtataacagaaaaaaatgatttggcctaaaatattttaaaggcatgtgttagcaattgactgacctccattatgaaggaatctgaatttttatcccctttagaaagtgtgatttttgaacagagtgcatgctgatggtccttcaagcataaattagctgcaaaatgcaccccaaataatggattctgtccagttaagaagcaaattagatggataaaaagcacttagaacattgcgaaaaagttaaaactgtgttaaaagagagaaaataatcggcccagcacggtggcttacacctgtaatcccagcactttgggaggcccacgtgggcggatcacctgaggtcgggagtttgagaccagcctgaccaacatagagaaaccccatgtctacttaaaacacaaaattagccaggcgtggtgggcacctgtaatcccagctgcttgggaggctgaggcaggagaatagcctgaacccaggaggcagaggttgtggtgagccaagatcgtgccattgcactccaccctgggcaacaagagcaaaactgtctcaaaaaaaaaagagagagagagaagatcaagtgctattagtaaatagcaagtagcaggatgggaaaagtttaatccaaggtacattttaaaaaattgtatggcaggcagccccactcccaatgtgaaaagcgtttcttgcctatagttgcaaaagaaattcataaaaatgcaataaggctttaaattaaattggcaatatagtgttctcctcttttccacggttttgctttccatgatttcagttcctgtggtcatccatgtatgaaaatattgcatactataatatactttgagagaccacattcacgtaacttttatatattatatataacaatattacgtattgttatacttgttctgttttattagttattaatcttttcctgtgcctaatttataaattaaaatttatcataggtatgtatgtgtagtaaaagacaatatatttggggtttggtactatccatggtccaggcatccattggggatcttggtacatatctgccgcagataagagtggggactactgtatcctgacagtccacaagaatggggatgcttctccttttttgtgtctgtgagttatgaaaaaatgggcatactggtggattggagtgtctcctactggcctgagacctgattgttaaaattttaggaattctgcaaactgattgttaaacacagctattattaaaaactaaagaacataggcttactattaaaattacattttaaaagctaataaatacttcaaactcatcacttcctaattattttactacattttattataatctatgcttttcaagctatttatgtaagtatatcatacctctggttgaaataatagaatggtgtgcttttgtacatttttttccccaactctatatttggtgatgtcacaatgataactagaaattagctatgggaagaatgtttacgctacagagattgtcaaatgccataaatagggcttgatttcttatttcttgattgtctagacttaaagtgatggagaaaatgctgctaataaaaatgtgtcatgcctttagttattatattgtaactaaaaaaaagtatatattcttccattcttaaaaaatgattacttcagctaagaagtcgctcacatcattgacatcagtgacataaagaaaaacatcaagtaatactacaaaggacacttggaaagctgattgctgaatatttgccagcacactgctggtcatggcacagtcgaaatcattgctttggtaggaaatagataataatataaatttattatactgattttcagctataggaaatagtattacatgtgagcattatttaagaaaaaaaggttgaatttgtaaagtcattaactgtggcacataataattttaaagtagataatttgaagcctttgataggtctattgcagattagaaatagaatcatagaatttagagtttctctagtatatgtcagtcatccagcctttatctaaattctgctagagacagagctcatttcctggtaataacattggagaaatctagtagtagaattctttcttactttgagctaaattttgttttccttttatttctaacaattggttctggtactgacttctggagaaacatagaaacataaacaagaaatcttgtctcttttatagagcaactgatctttcaggtataaagttagctgtggtttttcattgagacctctttgggcaagaattatacctttagttcttttagctctacattgtatgacatattttctagactctgtaatctaagagtgtgttacctttttaaacatcacatcactattttggggcttttattgaccttgtgaacgaaataaaagcctttagatctttctttatgcaaattatacagaagtcacgtcttctgtcttttgtttgattctttaaaaaaaaaaaaaaaacctccaaaagagatccttgtatttactgctttaaaccttcatattgctttcagcacagcatttcagattatagaaatgatattgaattttaattttataatttttggtatttattagttctgtcatttttgtgtcagttgcagacttgataagcactcagtgtttattgtttacatctaaattattgtataaattgttgaatttcaaagggctatataatcctcctttaactaatctctaaattcatttctacccattattattattttttgtttaatcttttgtgagtccacttatcagttttgctaagtaatccccatttcatcattttatatccagaagttcattatgatatattttgtcagatgttttacttactgtaatccaggtgtgctatgtctctggtatccctttctatgaaacacacttcagtacttctgtctttgaaaattaggcattttttgaaaaatcctggcatgcctaaatgttaaggtcatattcttcctcaaatggaagatataaaatacatgaagaatgttgggctagatgttaactaagataccaaaagagaaaaggaacaagataatcactggagatacttgatgatcagggccacggtattacttgggctgaaaggaaaataacctgtgccatgagaatagagctttttcatcaaggaagtattctggaccaggtgaaattttagggatctggaatagagtggacaggatgcgttagccttttttcctctctgccttctcattatctccttcttttgaaatgtacgttgtgaaatgttaacagtgtgtgcatctgtgtgtatgtgggtgtttctctgttgtgtatagcacctccttattctctttgtcctggacaaacttatccctacttcatagcattattttgaaaattaaaagaataattcaatatgaaattccctagcacattttcttgtattttagtagatagtagataaagatttttttaacttttgttatatttcttcttgttgaattccattgagcaaccatggtggaggttgtcagggagttactagagtgaattgtctcatcacagtttccttggtcttctatcctccttcatcctagccagatctgttttattactgctggaagcaagggaaattgatagcaagtcacttgactaaatggtattaatagaataatacttttctctttttcactactttctcttttctaagatatcttagatcaaaagcagcatcttctagaaagcattctctgataagtcatttcattttctagccaacattcaagttactctcagaaatcactttatgtgtatgtatatttatgttgaacaacaacaacaaaaaaattaaagaaaaaaaaaaaggccgggcacagtggttcatgcctgtcatcccagcactttgggagacaaaggtgggtagattgccttaagctcagcctgggcttgagaccagcctaggcaacatgatgaaacccggtctctaccagaaatacaaaaacaaacaaacaaaaccacaaagccaggcatggtggcatgtgtctggtcctagctactcaggaggcagaggtggaaggatcgcttgagcctggaagggcagaggttacagtgagctgagatcgctccactgtactctagcctgggtgacagtgtgagactctgtcccaaaaagaaaaaagaaaatattttggttcaatacattgtaattagtgtctaataattaaatcattcttctcttgcagattgtggtggtgccatgcagcaagaatcagagagatgcagagttagagccagaaggcctgacatggcactttatgtacctaaagctcgtaggggtgcagtactccttaagacaggtgatgaagaagaaagctgtggttcacctaactctgtggtgaaagaaaagcaaaaagaaagttctctctcccaaaaagaagtctttaaagacaaaccggaggctcgaagactaaatatcaatcctgatagaaaggagcataattgtagagaagaaaagaaatcttcaacaaaattaagaatggacacatgccttcaaaaaacaaatagagtttgttctaagagaggaaccactgaatccaaagaagtattatcccaaggacaacagcagggagccccaaatgctggggttataactaatgcacctttgcagagacattttaaaccaaagaaggtggagtgtttggaagttgaaactacggatgtgacaggacatgagaggatacttctttcacaggcctgtttagaaatcagcgaggctcaagttccaagcaaaccattccaaaatgtggaattctgtgacttcagtaggcatgaacctgatggggaagcatttgaagacaaagatttggaaggcagaattgaaactgataccaaggttttggagatactatatgagtttcctagagtttttagttctgtcatgaaacctgagaatatgattgtaccaataaaactaagctctgattctgaaattgtacaacaaagcatgcaaacatcagatggaatattgaatcccagcagcggaggcatcaccactacttctgttcctggaagtccagatggtgtctttgatcaaacttgcgtagattttgaagttgagagtgtaggtggtatagccaatagtacaggtttcatcttagatcaaaaagatacagattccattcctgcaactatgggtcacatctctctgtcagagagcacaaatgacactgttagtccagtaatgattagagaatgtgagaagaatgacagcactgctgatgagttacatgtaaagcacgaacctcctgatacagctgtccttgctcatgaaacacatagagatagtggatttaagaatgtaggtgacattaccaataaagcatgtatgatggacactacaggtatgtcctgtagtgatcatgtaactgttgatagcccttatgtagttgcagttagaatagytgatgagacctctattaatacacgaagtttctcaaagtttgtaggaatgagtgcagatgcaacccctcttcatgtagctagaagtgggaatgacactgaagatttcagcaacccttctgcttgctcagatatttatggtgagagtatttcatctcattttacagagtcaacaggaaagttgatagagagcttgtcagattgtgcttcctccttacctataaaaaagattgctggtagtaattataacacttttttggactctgaactcagtatgttaaatgggacaaaagttctttcagacagtgccgtgggcattgacctgggtagtactggtgatacaacagaagcattgcacgaactaagaactgccgaagagttcaaaacagaagagcaagatgmctcagggagtatagaatttggtgtatcttttyctgatagggaatcatcatctatggaaacatccatcgaaccaaaagcaactgaaacttctcrcacagagggaattactgccattgaggagagctgggagtctatgtttaacgatgatggtgactgcctggatccacgtcttctacaagaggtatgtttaattgaaattgcttgatgcttagttagtttataaattaggatttcagtggtaattttgatagacagtgatgcacattcactgatatttaagagttcctgcaataaactaataggcttgtagattaagaagagaatatctgatagatctttaaaaaataaaatatacagaattgagctgtatctataatagccaagccctgagagattttatggaataaagatgaatttaatggattttaactatctgtcaaggaaatrcaaaggaaaacttcttcaaaaaggtttttctatgttgacaaggtatcttttacatgggcctatttaagggaaggagaataatttattactattgttatttatattttattttctagtggatgttggagtgttagacactgtagagggaaggaagtagagaaaagaagggtaaaatacaagaaagtatcattgttttttaaggagtttatactgggttaaattgaagaatgaattacccatttagcataaatagaagatgtaagtgaataatgatatgctggccaattagaattcataaataaatgttagatttgaggcatcttagaaattactcagttcagtctttttgttttcttaatttaaatgtttactctgtatccaacatttaaattccttaccttaaataagaatcactggttttaagtagtagaacactccctctttccttccctatagtgggttcacataactttgcctggaaaggaaaaaattattttcctataagagcaccagttttataaatgaggaagttgaagctcagtggtcacacctttaggaaaggcagaatcaggatttcagtctagttctgtcttaatccaatgtttatgttctctctacgagactatttcctcacctaaaggatttcttttgaggcattccaaagacccttttgaatactaagtgatgagtcttttgttctgagaattaagctggaagtatagaaaaattatcacatgcctgtaaaagagccacataatactgaagagggcggtccattggatagaactgactttccaataccaagcaatcccacctcattcgtgggagctgtttgcacagaaagaatttccctgtaccacaaacgagcacatcctgtcaggtcaggaaacactatatcttaaacattccttagaacaaaatatagagcggagaatacctatgaatgagcatccatgagccccttgaattacatgcaaaattatatgtacgtatgtgtgttttttcatagctttcatcagattctcaaaggcagtgatttccaaagtatggtccctagaccagcagcatgagtatcacctaggaacttgttagaaattcaaattatttagcccagcaaactgtctatttacaactttttcaggggattctgatgcacataaagcccgagaaccactgctcaaaggtaatacacttaaatctatatcagaatgtgagtagggaactgcaaatgactgtcagcccataattagaaaaatactgttcagtagaggtttgagatccaaatcaggttaagaaataataataaggtgggaagctaggtgaatatagagatgttattaagaactaaagcattgagagaaggctttagtctgagaaaagaaacagtgttcgcaagagttggtgaaaggactgcatgaggaatagagagagcacatgaacatggaggagagatgaacagcttcctccaaaagaagagcgtggctctcatggccttttacacatggtgtagtactcagtaaatatttatccaatggatggcgttgatagggcagagttgggggctctgtctttttagggtggcttccaggggctttcaaaacatcaggggctggaacttggattcagtggggtagcttatggatatggcttgtgtattggaagagggggagttcaggtgtacaactcagtttttcaggtctttccagtgtttaggtgtaagataatttaggcaacaactcagtatttcgaggagcatagtaacataaagaggacattgggatgacctaaagctgggattgggaggaaaacagagaatatagtattttaagctgaagatggacagtgtctgggtgttgtgtttggcttatgtttggaggtacttggaaaagagtagggtctgtgttgaggaatgagcataactgagaacaggaaggagggaaatggattgagaatgcaagtagcagatccaactcctctgctttgggttttagaaaatgtaataatgatactgttattaaaagatgtcacaaatccagcaacattaatagccctttgatgacttctggtttattatttttattgctccaaacatactttattaagtgctaaagcagagtgagtgcctgcctcccttgaaaactttccaactaaaggtttttggctatcatcccagctggcctgtttcttgattgatagcagctagacatatggaggtatgtctaatacttctaatagtcaggtatgctgtagagcaaggtgtgacagccattggcttgtgaagcaatttcctgtgacatttgaacctccaaaactgccttagggggttagagtataagtaggtcattattgagctcccagaactgcaactcttgatgagtctccaagaatcacacttagtctcctaaagccacggtatggaatgcccagaaacttaaggtggtaattgatgaaggagatgatattggcatgactttttttagccctctgaattcttggtagaagaacacaggagttatttttcattagaaaatactttcatagccctactgccatctgtactgatcatcagatctattggtaggaggattaatgggataccaagaacataacattgatgttgatagataccagcatttgttaccttcattgtcatttctggcactgatttgaatttttagataggggtaaatatttaagtagtatctcctaaactttttaagaatttgaggccttcccttggttacagaaggccactaatattataccaccatattctataatagtatgtagaccataatgggtaagagaagagtaaaaggaataccatcttttcccacccatcttacttctcagtgtgtgctaacttacattgttatactgtctctgtctccctatagtcttttgcaaaaatggtgtccatgttaagtggaaaacccaaaactgaaaggaaaaatttataatccagtcactaaaagcaaattatgtaacatacaaagagaggaaagcccttcatatcccaacccctcgaggcctcataaatagttggtagcccatcacctttcagttgaatagcaaatattgaacacttagagtttgataaactataaatccctaatagctagatatgtgttgttatcactgctatgttaaaggcactgtgctgcatgccatcttttgctctgaagttgttcatgttttatttggagagacagtatgtaactatgtgactagtcccacagcaatctgcagggaaattaatataaaacaaccttataacagatgtactaaaactgtatttcattgcctgataagtgacacagaatatgacttcaaaaggagattagagggataggacaggggaaaaagaacaaaaggggattagatcccccaatgctagactggttgatgcagtttcatgttggtgaggctatagaattaaacaagagattatagttcccacttttactatgctgttctgtttctaatttctgttttctattccattttaaaaaaatctatagactttatttttgagtagttttagatttatttaaaaaattgaacagagtacagagttcccttgtaccccctcacctgtcgttctaatttttttcacaatatcttttaaaagttccagctcattttaacagatttctaattcatattttataaaratgtctgaattgacatgttattgactgcctaagtggggatttattgactcactttccagatgctgtatattctaatgcagtcagttgggacattcagtgaagaatctgagtgaattatgtactctgtttttattgttcaatccattagtgaatgatgactagatctctggtccaaacagaaagagggaacattaagtagattcmatcactcatagtttttgtttttgtaaccaggtgactcctaaaattaaaaatctccctttgagctctgttatatttgttgcataacattttttcctcagaatcagtatagaagccagcagcattttaatttctgatcctctttcaaaactgcagaaaggtgaacagttctgggcctgtattgtcagtacaaggaagcttttatttaaggattcttgcctgaagattcagattcctagtgtaccttgctctgtccttggcagtgcttgtttcagtgaattccatgagatatggcatgtggagtatggttagggcattttttaatttgtcagggtatatatatagtaaatcataaaatcttaaattgattttcttcagtagaaagtgagttaacaagcagttaagtggaagagaaaaacagaaatgaagggcttgaataacctcacctacataattgagaattgattatatgggttaattctatgtaaatagatttttgaagcaactgtagtaatttcacaccaccaacttgtgcccaaatcttgttgtccttgtcactgtaacccccagtgcctctcatttaaatttgttttacctataactgtaaagtggtttgttatgtttaattgtgtttaattaaaagtacccatgaaaacgttcttattcctatcttccaagatgagccagaatttatagtatagtccttgacatataaggactcagagctagagctttatcctgtcttagagatagaactgcacaagtcattttttaaaagtggaatgttagcatttaaaatcatttctgaaaataagtctcattagttctacaagactatcaactccttaaacattgatttagcggtctagtctagctctagtctagtctagcctacaatctagtctggccccttcttattttatagataaggtaactaaggcccagaagggttgtagctaaagtaagttcatgccagagttggcattagaatctgtgcctcctggtttctagccctgcgctctttccatgacattaagcctttgtctctacctgactgggtctcagccagtcaacagatattgaacaaatattctgtgcccagcgctgatcttagtgatgttgggggtaaaagagaaggataacaatatttaaacagtgtacagtcctgtggaataatgagacttatttattctcaggaatgactagaaaaaaaagagtattctatttaaatgaattggaaatgcctttgtgaaatataccattattttatgaattactaagatagaaaaaactttgacacagtgcttttcccttaaaattttaattttatacatattgaaacaactctcctaattagacataaatttttttttatcatatttcatcttcatacataaaaaatgtagtaaaataaattggttaagattttcctaatacttcacgttcacaatccaactctttctaataatttgttgattcagccactgatattgatgcttttctattcagtgtcatccattttgccattgagaactttgatgacgcagcatttcttaaaagaatacataaaagaaccaaaaatctttgttgcagaattcttaagacacctttgtacttgtgtagagctgttctgatatttagaattttcctccacattactgaccatcctttctgccagttttggtactggtgcttctgatacacatgtgcaggaagcaataacaatatgttgattgtgatgcgtcctaatgtcagtgttgttaaaatgtgaaaaaaaggatatatcttagaattgatgaaatgtatatatccaactactgagtgttaggaaatagtaatataggaaaggaaagatcgccaaattggagtaaattgggaaagaagcatccagaggagtttaaagattgaagctggatcttgggagaagacggaacatgagcagaaaaagcattccaggttgtgagaacagcttgtgaaaaacagaatcagaatcaagtcctaagtttgtcactatcagaagtttagatgatttattttgaaattttgttttctttttataatttattctgaattttcttcatgattaaccagggcagttgaagtttattggtaaagggaaagaaaaaagtatcaatttttttcccccaattttagagtgccatttagaatcatttaaaaaatatatgttcttacctgagcagggtggctcacacctgtaatcccagcactttgtgaggccgaggcaggtggatcgcttgagtgcaggagtttgagaccaccctaggcaacatggcaaaacctcatctctacaaaaaatacaaaacttagccgggcgtagtggcatgtgcctgtggtcccagctactggggagggtgaggtggaaggatcgcttgagcccaggaggcagacgctgcagtgagccaagtcatatccctgcacttcagcctgggcaacagaatgagaccctgtctcaacatacatgtatttgttgttgtataaatcaaataagtcttgggtttttttgttcgtctgttttttatgtggtgggggttgagacagtctcactttgttgcccaggctagagtgcagtggcacgatcttagctcactgtagcctcaaactcctgggctcaagcaattctgctgcctcaccctcccgagtagctgggaccacaggagtataccaccatgcctgtctaatttttaaaaaatttattttttgtagaggaggactcttgttgtcttgcctaggctggtcttgatcttgtggcctcaagtgatcgtctcacctcagccccccaaagtgttgggattrcaagtatgacccactacacccagcttagaataagtcttgttaagcatgcatttggacaaaataattaacttgaagcatgtacattttattcattctataaatatatattgactgcctagtttgcaagrtaatatgttcagtgggggaatataggaataaatatgacatgtcagttatagttgaatttaaaaccaaaatgttggtaaggaaattgaaactccatccttcttttccagccttatttactagaataaggtattagtttgctagggctgtcatacagagttttatagtttcaggtcttacgtttaagtcattaattcattttgagttggtttttgtatatggtaagagataggaatctagcttcattcttctgcatatagacatccaattttttcagcaccatttattgaagagggcgtgctttcctcagtgttcttggtgcctttgtcgaaaatcagttggctgtaaatgcatgaacagaatagggttctctattctgttccattggtctgtatgcctgtttttataccaataccatgctgttttggttactacagctttacagtattttttgaaatcaggtagtgtgatacctccagatttattctttttgctcagtattgctttgactattctttgtcttttgtggttccattcaaattttagtattgttttttctatttgtatgaagaattgtcgttggtattttgatagggattgcattgaatctttagattgctttargcagtatggtcattttaacagtattaatttttccagttcataagcatgagatgtcttccgatttgtttgtgttctctccagttttctttcatcagtgttttatagttttcctggtagagagctttcgcctccttagtcagatttactcctaggtattttatttcattttttgtttttattataaatgggatttctttcttgattttttttttcaactagtgtgctattggtgtacagaaatgctgagttatattggctgactttgtatctggtaatttactgaatttctttatcagttctgagagttttttggtggagtcattagatttttctataagatcatttcatcttcaaagagatacagtttgacttcctcttttccaatttggcagctctttatttctctttcctgttgctctgtctaggacttcaagtactacgatgaataagagtggtgaatgtggacattgttgttttgttcccattcttagaggaaaagtggaaagcttttcccattcatcataatgttaggtgtgagtttgtcatatatagcctttattatgttgaggtatgtttcttctatttctaatttgttgagggtttttatcatgaagggatgttgaacttcatcaagtgctttttctgtatctgttgagatgtttatatgggttttgaccttcattctgttgatctaatgtatcacattttttacaaaaatcaacaaaatactagtaaaccaaattcaacataaaaaaaaaagataccatgatcaagtggggtttattctaggaatgcaaggatgattcaacgtatgcaagtcatatgatgatttgaccatggttagtctagctggtgttttattgattttggtttttgtattaaaaaaaacttttgtttcattgatactttgtattttcttagtctctcatttagttccaatgttatctttatgaagtcttttactaattttgggtttggtttgttcttgcttttctaattcttcgaggtgcttcattaggttgtgctgatgagaatgtatcctgcagttgttggataaagtgttccagtaatgtctgttaggtccatttggtttacagtgcagtgtaaatccaatgtttctctgttgattttctgtctagatgatctgtccaatgctgagagtgggatgttgaagcccccagctattattgtattggagtctatttcttcctttagatctaatagtattttctttatatatctgggtgctcttttgttgagtgcgtctatatttacaatgttttatcatcttactgagttgatcgctttatcatagactttgtttctttttttttggaaactctgtctcccaggctggagtgtagtggcatggtctcagctcactgcaccctccaccttctgggttcaagcgattcttctgcgccagcttcctgagtagctgggattataggcgcatgctattatgctcagctaatttgtgtatttttagtagagacagggtttcaccatgttgtccaggctggtcttgatctcctggcctcaagtgatccacctgccttggcctcccaaagtgttgggattacaggtgtgagccaccatgcccagccaggcctttttaaagtttttgacttaaagtctgttttatcttacataactacccccgctttgcttttagtttctgtttgtgtggaatatattttttcatccttttacttccaggcaatatgtgtctacaggtgaaatgtttcttgtaggcagcatatagttgggtcatgtttattaatctgttcagccaaattatatcttttaagtggagaatttaacccatgtacattcatggttccttattgataggtaaggacttattcctgtcattttattgttttctgtatcttttgtttctttcttcctatcttatttatctttgcagtttgatggttttctgtggtggtaacatttgacttctttctctcatttgtgtctgttctgccagtgagctttctgctttcatgtgtttttatgatggtagatagcatcctttcacttccaggtgtaagatttccttaagcatttcttgtaggtccagtctcatgataatgaattccctgtttttgcttatctgggaacaactttattgttgttcccatctgatgggaatcccttctgtatatcccttctatgtaagattttctcttgctgttttttagaattcttggtctttgacttttgacaacttgactagtgtgccttggagaagacatttttgggttgaatctctttgggaatctttgagcttcctatatttggatgtctatatctcttacaagacttgggacattttcagctgttacttcattaaataggttktttgtgcctttagccatctcttctccggaactcccaaaatttaaatatttgtcactttgtgatgtccctcatttcatgtaggctttctttattctgtttatttattttctgacagggttatttcagagggtctgtcttttaagttcagaaattctttcttctgcttgacctagtctgctattgccctcaattgtattttttgtttcattcattgagttcttcagttcaggattgatttagttcttctttataaactctaactctttgttgaatttctcattgaggtcatgaattgtttgtctgatttccttgtattatttatctgtgttttcttgtatctcackgacgttctttaatatttttgaattctttgtcaggcatttcatggatttctttttcttttttttttcccatcttttttttttttttatactctaagttttagggtacatgtgcacattgtgcaggttagttacatatgtatacatatgccatgctggtgcactgcacccactaactcgtcatctagcattaggtatctctcccaatgctatccctccccccaccccacaacagtccccagagtgtgatattccccttcctgtgtccatgtgatctcattgttcaattcccacctatgagtgagaatatgcggtgtttggttttttgttcttgcgatagtttactgagaatgatgttttccaatttcatccatgtccctacaaaggacatgaactcatcattttttatggctgcatagtattccatggtgtatatgtgccacaatttcttaatccagtctgtcattgttggacatttgggttggttccaagtctttgctattgtgaataatgccgcaataaacatacgtgtgcatgtgtctttatagcagcatgatttatagtcctttgggtatatacccagtaatgggatggctgggtcaaatggtatttccagttctagatccctgaggaatcgccacactgacttccacaatggttgaactagtttacagtcccaccaacagtgtaaaagtgttcctatttctccacatcctctccagcacctgttgtttcctgactttttaatgattgccattctaactggtatgagatggtatctcattgtggttttgatttgcatttctctgatggccagtgatgatgagcattttttcatgtgtcttttggctgcataaatgtcttcttttgagaagtgtctgttcatgtccttcgcccacttkttgatggggttgtttgtttttttcttgtaaatttgtttgagttcattgtagattctggatattagccctttgtcagatgaggaggttgcgaaaattttctcccatkttgtaggttgcctgttcactctgatggtagtttcttttgctgtgcagaagctctttagtttaattagatcccatttgtcaattttggcttttgttgccattgcttttggtgttttagacatgaagtccttgcccatgcctatgtcctgaatggtaatgcctaggttttcttctagggtttttatgttttaggtctaacgtttaagtctttaatccatcttgaattgatttttgtataaggtgtaaggaagggatccagtttcagctttctacatatggctagccagttttcccagcaccatttattaaatagggaatcctttccccattgcttgtttttgtcaggtttgtcaaagatcagatagttgtagatatgcagcrttatttctgagggctctgttctgttccattgatctatatgtctgttttggtaccagtaccatgctgttttggttactgtagccttgtaatatagtttgaagtcaggtagcatgatgcctccagctttgttcttttggcttaggattgacttggcgattcgggctcttttttggttccatatgaactttaaagtagttttttccaattctgtgaagaaaggcattagtagcttgatggggatggcattgaatctgtaaattaccttgggcagtatagccattttctcgatattgattcttcctacccatgagcatggaatgttcttccatttgtttgtatccttttttatttccttgagcagtggtttgtagttgtccttgaagaggtccttcacatcccttgtaagttggattcctaggtattttattctttttgaagcaattgtgagtgggagttcactcattatttggctgtctgtttgtctgttactggtgtataagaatgcttgtgatttttgtacattgattttgtatcctgagtctttgctgaagttgcttatcagcttaaggagattttgggctgagacagtggggttttctagatatacaatcatgtcatctgcaaacagggacaatttgacttcctcttttcctaattgaataccctttatttccttctcctgcctaattgccctggccagaacttccaacactatgttgaataggagtggtgagagacggcatccctgtcttgtgccagttttcaaagggaatgcttccagtttttgcccattcagtatgatattggctgtgggtttgtcatagatagctcttattattttgaaatacgtcccatcaatacctaatttattgggagtttttagcatgaagggttgttgaattttgtcaaaggctttttctgcatctattgagataatcatgtggtttttgtctttgtctctgtttatatgctggattacatttattgatttgcatatattgaaccagccttgcatccaaaaacccttcaaaaaattaatgaatccaggagctggttttttgaaaggatcaacaaaattgatagaccgctagcaagactaataaagaaaaaaagagagaagaatctaatagatgcaataaaaaatgataaaggggatatcaccaccgatcccacagaaatacaaactaccatcagagaatactataaacacctctacgcaaataaactggaaaatctagaagaaatggataaattcctcgacacatacactctcccaagactaaaccaggaagaagttgcatctctgaatagaccaataacaggatctgaaattgtggcaataatcaatagcttaccaaccaaaaagagtccaggaccagatggattcacagctgaattctaccagaggtacaaggaggaactggtaccattccttctgaaactattccaatcaatagaataagagggaatcctccctaactcattttatgaggccagcatcattttgataccaaagccacgcagagacacaaccaaaaaagagaattttagaccaatatccttgatgaacattgatgsaaaaatcctcaataaaatactggcaaaacgaatgcagcagcacatcaaaaagcttatccaccatgatcaagtgggcttcatccctgggatgcaagatttatttttcattggaatgttggtgaataattactgtgttcttttggaggtgttatgtttccttgcttttttatgtttcttgtgttctttcattcatatctgtgcatctagtataatagtcacttcttcaaattttatggattggctttcatagggaaaatactttttcctatagatatatctawtcttttggttgggtcaggcactttggttttgattctgggtgggtaaagtagcatagtttctgtatgatatcttgggctgtaatcagttatttgtgtctgtgagtttttcaatggcttaggctgtggtggttagtggaagctgtagtagaactttgctggggatgaggacaccaggtagaggccagtccttggacaacagcaggctgagtgtgctgatccttagggcttcaggcagcgttctgtgcaccaaaggtagtgagtctggacaggctgatccttaggcctccaggcattttacttgggtgtcagcagtggcagcagtgtgctgggtgagcgtatgggtccttgggctcctgggcaatgtgttttggtgatggtaggagcagcagtgggctatccctctggctcccaagcagcacgcagaataattacgcaggtggggggttgtggcgggtcaatctccaggctccctgatgttgcacttgaatgcaggctgtggcaagtggggcaggctaatccctagccctcagacagtgtgcttgggtgccgctcattgttgtagcagcggaaagctgtgtaggctcattcttaggccccaggaaggtgtgcatgagtgacaggtgggcaggtctgctttcaggttcccctcatggtgtgtgtgggtgccagtggcagcagctaggaggggcataatgtggcatattttttttttgtctgtggggaataattggcatgtgacttcagaatttcttgtttttttccttttatatgttgaagaactaagtattaaataaacagaaaacaaaaaataaaaactcaatgatgcatgccttgttgatcttgtgctctctcccctatccttttatccctctgcgaataggcatcagggcaataacatcattactagttgggtaatagtttatagacttgttttcaagaccagactgctaggccctaagtgtcttcaaaccctttatttcgggaagttaattttaatttagttgaatggttttgtggaagctagttgtgcatatgaaggaatactcacatatcatttatgctttataaatagcaacacagaccactatttaagatcctaaaaatatttgtgattcataactcaaaattgttttctctgaatcatttgtaaactttcccttggtctataatagatagatcagaatgaatgaaattctaaacgtctaccatctgtttttgctctatcagacattcttagccctaataaaaaatattgtgaaggtttcatattgactttataggagggattgcccaaatacatgtgattcttaaggtaaatgtttctgttgtctacagtataaatacaatgcaagtcacaaatgtgaaccacatgtatggttttgcattttctagtagccatattagaaaagtaataacaggtaaaattaataatatattttaacctaatatgttcaaaataccatttcaacatgtaatcggtataaaaaattattaaagacatttttttttgtattaagtcttgaaatctgtgggatattttatacttacagcatatctcaatttgacctagccacattttacttattacatagccacatgtgacaggcagctactgtattggacagttcaggcctactgccaaagtacataatcagtacatcagattgtagagctttttcttaaagcttcccatactgccatgtctcatcactctgtgtcagtggtcctacctccccatccctcttcacagcctttctttgcctcacttccatcttcatcccatgttatcctctctttgacactttctcccttttatgccacaaatcctctccttctttctgtcaagttctcttgcatgttttgctgagattcttaggaaagaaagttccattaacagtatgatatcctatctccacaaaaaaaaatgtgttactggggaaatgtaagttgatctcaacaatatcagtaccctgggggaaatgaagttcttcctcctctaggaaaagttaggaatctctgatgattgtggattctgagtgatacaggaagaactgatcagaagtatgtaactcgtagcctttgtttgtttcatgaaatgtagaacaagaattatgttttttgctattattaacactgtttttaatcagtgtcagaagccagatgtttaataggtacctcggaaatgagatataagtatacaagtttagctttgctgactagattagagcaaaggagcataatcaaattttcttgccagactatcctgtcatttccttcctttttgtaacttttttttttggtacaaagtcttggctcggtaacccaggttggagtgtagtggcacagtcttggctcactgcagcctcgacctcccggactcaagctatcctccggcctcagcactcccaccctgagtagctgggattacaggtgtgtgcctccatgcccggctaatgttttgtattttttgtagaggcagggttttgccatgttgcccaggctggtcttgaactcaagcagtttgcctgcctgggcctcccaaagtgctgggattacaggtctgtgccaccatgcctggcctgtaacatttctcaggatttatatttctaagatattttgtgatttgcattgtatctttgacagtgtattatttagccccaatttatgaatgtacaaacatgcagttccttgttttgtttgggttttgcaaagtaactcaaagtcaatgcagaaaatgaagaaaacaattttacaataacctcaaaaagaataaaacatttaggaatacatttaacaaaagaggtataaaacttatactctgaaaactataaaacattgttggaggaaattaaggacttagagaaatggaaagacatcccatgtttatctactggagaacttaatattgttcagatatttcctaagttgatttacatattcagtgcaatcccagctgcctggttggcagaaaattttttgcagaaattgacaagcagatcctcaaattctctggaaatgcaaagtgccctaaataatcaaaagtgattttgaaaagaacaaagttggaggactcaggctttctagtaagcttcttgatttcaaagagtactataaagctacagtaaccaaaacagtgtggcactggcataaggattgacttgcaagttattgcagactccttttgtccctggcctctgagttattccaaactgttaacactaatctactctagacgtttaagaatttattaaagtttaactgataycttcttgcccacttatgtggtgatcacttcttccagtggtctgccaaaggcaaaacmgtttatgtattctgtttctctttgggagagacttgtcattgtatggattttaagataagcagtttcccttgttatcttacaaactcagctctctggtaaactcaagaaaagttatgattttatagatcagctggtcttttctcttgttacagtgggaagaacattctcttctgctttctacatcctaagcagagtggaactaatatggtgtttggcatgtaacagacttagcacttggttaaaattcttttaaagtgggtttactttactgaatacttatgtgccaagcagtatgctaagcacttaccatatcatctcctttagtccatgcacttatctatgaagtataggtactgttattattcccatgttttacatgtaaaactgaggcttagtagagaaaaggaactggaggcacaggaataaataataatttttattgatattatccaaatcaccttcctccttctcccaataaaactcttgaatccatttttcaacttttccaaggaaaggagatatatattcctggcattgcaagttcttattttcctcatttgatgggaaaagagacacagtattaaaaccagagaaagcttgaagggacctgggtgaacttttgattaacagagagagagagagagaaaaaaatattatctaaggatctggtggctttgggtcatcagcagtgtgtgttttttttttttttttaattatactttaagttctagggtacatgtgcacaacgtgcaggtttgttacatatgtatacaggtgccatgttggtgtgctgcacccattaactcgtcatttacattaggtatatctcctaatgctatccctccccccttcccccaccccacaacaggccccagtgtgtgatgtcccccttcctgtgtccaagtgttctcattgtccaattcccacctatgagtgagaacatgtgatgtttggttttttgtccttgcgatagtttgctgagaatgatggtttccagcttcaaccatgtccctacaaaggacatgaactcatccttttttatggctgcatagtattccatggtgtatatgtgccacattttcttaatccagtctatcattattggacatttgggttggttccgagtctttcctattgtgaaaagagccgcaacaaacatatgtgtgcatgtgtctttatagcagcatgatttataatcctttgggtatatacccagtaatgggatggctgggtcaaaatggtatttctagttctagatccctgaggaattgccacactgtcttccacaatggttgaaccagtttatagtcccaccaacagtgtaaaagtgttcctgtttctccacatcctctccagcacctgccgtttcctgactttttaatgattgccattctaactggtgtgagatggtatctcattgtggttttgatttgcatttctctgatgaccagtgatgatgagcattttttcatgtgtcttttggctgcataaatgtcttcttttgagaagcatctgttcatatccttcgcccacttgttgatggggtttttgtttttttcttgtaaatttgtttcagttctttgtggataaagatattactcatctttgtcagatgagtagattgcaaaaattttctcccattctgtaggttgcctgttcactctgatggtagtttcttttgctgtgcagaagatctttagtttaattagatctcatttgtcaattttggcttttgttgccattgcttttggtgttttagacatgaagtccttgcccatgcctgtgtcctgagtggtattgcctaggttttcttctagggtttttatggttttaggtctaacatttaagtctttaatccatcttgaattaatttttgtataaggtgtaaggaagagatccagtttcagctttctacatatggccagccagttttcccagcaccatttgttaaatagggaatcctttccccatttcttgtttttgtcaggtttgtcaaagatcagatagttgtagatgtgtggtattatttctgaggcctctgttctgttccattggcctgtatctctgttttggtaccagtaccatgctgttttggttactgtagccttgtagtatagtttgaagtcaggtagtgtgatgcctccagctttgttcttttggcttaggattgacttggcaatgcgggctcttttttggttccatatgaactttaaagtagtttttttccagttctgtgaagaaagtcattggtagcttgatggggatggcattgaatctataaattaccttgggcagtatggccattttcacgatattgattcttcctacccatgagcatggaatgttcttccatttgtttgtatcctcttttatttcatcaagcagtggtttgtagttgtccttgaagaggtccttcacatcccttgtaagttgggttcctgggtattttattctctttgaagcagttgtgaatgggaattcactcatgatttggctgttttgtctgttattggtgtgtaggaatgcttgtgatttttgcacattgattttgtatcctgagatttgctgaagttgcctgtcarcttaaggagattttgggctgagacagtggggttttctagatatacaatcatgtcatctgcaaacagggacaatttgacttcctcttttcctaattgattaccctttatttctttctcctgcctgattgccctagccagaacttccaacactatgttgaatgggagtggtgagagagggcatccctgtcttgtgccagttttcaaagggaatgcttccagtttttgcccattcagtatgatattggctgtgggtttgtcataaatggctcttattattttgagatacgtcccatcaatacctaatttattgagagtttttagcatgaagggttgttgaattttgtcaaagaccttttctgcatctattgagataatcatgtagtttttgttgttggttctgtttatatgctggattacatttattgatttgcgtatgttgaatcagccttgcatcccagggatgaagccaacttgatcatggtggataagctttttgatgtgctgctgcattcggtttgccagtattttattgaggatttttgcatcaatgttcatcagggatattggtctgaaattctcttttttttgttgtgtctctgccaggctttggtatcaggatgatgctggcctcataaaatgagttatggaggattccctctttttctattgattggaatagtttcagaaggaatggtatcagctcctccttgtacctctggtagaattcagctgtgaatccgtctggtcctggactttttttggttggtaagctattaattattgcctcaatttcagatcctgttattggtctattcagagattcaacttcttcctggtttagtcttgggagagtgtatgtgtcgaggaatttatccatttcttctagattttccagtttatttgcgtagaggtgtttatagtattctctgatggtagtttgtatttctgtgggatcggtggtgatatcccctttatcattttttttgcgtctatttgattcttctctcttctttgttaatcttgctagtggtctatcaattttgttgatcttttcagaaaaccagctcctggattcattgatttttttgaagggttttttgtgtctctgtctccttcagttctgctctgatcttagttatttcttgccttctgctagcttttgaatgtgtttgttcttgcttctctagttcttttaattgtgatgttagggtgtcaattttagatctttcctgctttctcttatgggcatttagtgctataaatttccctctacrcaaacagtgtctaggttttataacaggtgaatgacagaatgactgtcatggctttgctgccgctttccactttcccgttttgtttcttttgcttccagtgtgaagttcagctttttttataggacggtagaattttaatttgttacctcttttattaattccttcactagcctgctatatgcacattccttaaggtaggtctcatgctaaggacattaagtataactacttgtaccacttaatttgtcttaacaaatgcctttgtaagctgtctcctcaccctttaatacattcaacaaaaagtgaagtaaaaaagtttttttgaattttatttaaaaactttttttcatttttgttcacttccagaaaagaaactatgagcctggtcagtaagctcaattaaaacaaatattattaattaatctcttcagctattatctaagcttcattttccaagatgtgccatttataactcacaacagtattcagtctgtgttttctcgtgtgctggttagagatgcaagttgagtttcatgcattgcctgtctgctggaatttcaacactttttcaacagttccatatgtatagtataaactgggcgataagcacctgatcattattgtatctgtgagtagaattaatacagagactatgccaaaggttgaggaatgggaacatgtagagaaagggaggaggattgtttatatataggaatatattttacaataaccaggtttaatgtaaccggcacttaacgtgcttcttcctttctagttatcagggaataccaagagcagagagagcatccaggaacctagatctgattactacaatcatgaagttcctgatattgacctcagtgattgtgaattcccacatgtcattgaaatttatgactttccccaagaatttcrtactgaagaccttctacgggttttctgcagttatcagtgagtatgcaaatgattgtggatgttagggagggtgagatgaagtctttaaaaaatgttttctgagaaatcatctcttgttttttatatcccgtttttcatattttagcatcaggctggtttattgtcttttccaggtccagtagaaattttctrtattaaactactgttctaagttccttaaaaatgtcaggtagcctttctagcccccattttagcatttaagaagactgtcatcagtgatgacttcatggtgcatttagtccattaatacatattgtaattgttgatatatttggatgtattgtcagattgcctgccatctttatgtgtttatttgtcctatctttttctttcttgccttcttttggggtcactgcagcctcgacttcctgggctcaagcaatcctcccagcttagcctcccaagtagctgggaccacaggtgtgtgtcaccatgcctggctaatttttgtatttttttgtagagacagggtttcaccatgttgcccaggttagtctcaaactcctgcacttaagccatccgcctacttcagcctcccaaagtgctgggattacaagtgtgagttaccacgcctggcctcaactaagtttttatagacaaaataactcttcttttttacgctctgctcctgtttcattggtttaattttatttaattccatggtgaaaatatcaactcacactgatatatgtgggtttgagaacacttgcactaacccttggtatgtgtatagctgawacttatataggagaagttaaaagagttagaagtagatacctttgtatatttagcttataagaaaaaaataagcttcaggaataaagagatgataatccagaaagaaagttattaagaagattttcagggtctggaagaaagtcagtatcaagaagaattatactttaatgtttcagtcctgatatttaaaatgaaccaggtctgtagtgtgatataacaaatttaaatttaaaattcaccttgaatgtgtaagattctatataagtcagggtatagcccttaactttttcttaaaggataagtaaatattttagacaactctgccattgttaaacagaagcaagcaaaaacaatacataaatgagcatggctgtaaactaaaactttatttataaaaagaagtgttctgttttcatatgaagttctagaacaggcaaaactagcagccatgtacttgtttaatcagttaaacttaattcggtggggagcatcagttctataactaacagaaagaaagggtgaatggatcctggatgacagttaatctctgccataaactttaaatgtatagtgtgtaggtcagtcttacttactagaattaggttaaaatctagtatcagaacctgttcaacataaaattcataatagattttttaaaagcagtcagagggatcaaatcctgttagaactaccttagactgtcataaataatgatgattcttaaaactaaggatcattttgttgatgtctagaatttcttgaagatcaattaactcttacaaactatttacttccctttgctttgtttcttgataatctcacctgcaggaccatgtttctatcaaattcaaaaacattccccaaagagaaaaattttaaaggattatgaaattttgaagtataaaaggccctctagaacccatctgtgatttataaaaatgaaaatattaatattgatgaacattgctattaataataaaagtaatgaacaccattaatttattagatgcccatgaagtgctcaacaccatcttctttgccttgtcatggatgatctcatttccattttcacaacaactctgtggggaacatactttcttcatttttacagaggagccgacctagcttcaagagaggttaaacttgcccagggtctcaaggtggcagaaccctgagtccatgagcatttttaagctcttagctgaaaaatataactgttatgtcatcatcctgacattccttgtgctcactaggtagttgttctccaaaataaaagtgtttttctagtacttaaatgttcattcttttgatgctttctaatctggtctgatatttctcttatcatgattcctttcatccttaatttttctgactttgccacataattctttctaattttttcttatttttttaacctcccttctgcaacaagtgaagaatagatcagcctctctgattatagttgcccccttttttccccgttacttgacttttttaaaaaaattgaataacatcttcagtataatctcccctaccccattctcttctctttctgtctctgtcctcaaggacagagtttacatttgcattaaatccaggtgaccttccctgcctacctactcctcttatattctacccctcctctgcttcctctttccatttcttctcattccctgcccataagaacatctcttgtaaatagtgcattaaatactttacatccccaagggacttgtgaggattaattagttgatgtctataaaatggctgagaacgtaaaatactcctgggtacttgtttatgatggtattattgcttttaaaattcaatggcttcttctgtcctccaaactgttttctgtgtcattatccccattccacctgtgcactcgttgagtgtttctatcttgtgaaatgctttatgagattctatttgtgagatgtttcataaaagtaaattttattttaggaaataaaattgtttttttgtgttgcagaaagaaaggatttgatattaaatgggtggatgatacacatgccctaggagtattctccagtccaattacaggtattcacccagtggctttcaatcttcctttcttattgttcattttctcatgctactttttctatttcccttctatttgagcaagttggcatcttattcagccagtgtaggtaatagggcagttagtggtttttttgaggtaaggtactttggtacccattctcacctttcaccttagtccagtggtatttggagagatagagtcaacaccttccaaggttatttgtacacataactgtctgtcatgatagtacgtaaacagattaaggtagagattgaagaatccaatggggctcttaaaatattggtgattttttttttccatcctagacaagtgaatttaattagccctttaacctgtctagtgagaaattataatacataccctctgaatatatgattgggccttcttacatataccattggcctcatgatagatctgatgcagaggcattcaaagaaaatagagatattgaaacgttagttcctatctgaaccacctagaatatggatctgcaaaattattctataaaggaccaaacagtaaatacaatattttaggctttgtggagcatcaggtctctgtcactacttaactctgctgttggagcaagaaagcagccatagacaatatacaaaccaaatgggcatggctctgcttcagtaaaataataaaattactttgtaaataaatataaaaacaggtggttggctggatttggtcatggagccatagtttgctgatacctgatctaaaataattactgccacgttgatctttagatctgtctcttttgcttgctttgaaaaaaaagcataacatctaggaaatactaagagctatccctagtttttcctttgcatcactctacttcatgtcttctgcttccttttattcctctttgcagctcgtgatgcgttgggtattaaacacaccatggtgaagattcgtcccttgtcacaggccacaagakcagccaaggccaaagctagagcttatgctggtgagtctataatctctgggtttttttcttgctgatggtggtattattgttctttccagaagttttatagcatccagacatctaaagacatatcacttttatttttagtgttaaaagaaatatgtttttaagaaaaaataaataaaagggaaatgaccatgttggaaatatggcatctgagcagccacttggagtgtgtgagaactaactgcaggcaatgcagcaatcagtttctgatgacatccctacctagtttacctctgtgtttagctgcctgatagagtcactgtaagatactttgttaatgcagataatgaagccagggttgtttgtgctttgccatgttaatttcctctgatcatcatctatcagacttgtattaattactgctgatgcagcccttgttagtctattttgtatgttaattactgagttaaatcacttgaagctakagtgctctctcttcttgactccttcctactcccttcctttcttygattcagagttcctccagccagcaaaggagcgtcctgagacttcagcagccctagccagaaggttagtcatcagtgcccttggggttcgaagtaagcagagcaaaaccgaacgagaagcagagctcaagaaactgcaagaagccagaggtgagctgaaagggtggtgttcttctctaggcccttcagaactcactgtaaggcatgtgtttaaaaaaaaatgaatgaagcccattccatttttgtcgtttctgtttcctagaagcctcctaagtgtatagaaattttcatgccttacgtccaggagaagatgtttcaggattgtctgcctgtttcacgcaccaagacattctaatccacgctcctactgttgttttccaagagataggtttggtcttctcagctcatccatggcttttcctacagtttttctatgagaaaaattttcctgtgaaaacagatagtgtcctagggagaaaacatttgctatggttttactgggccacgattgccatgatattgccctaatgttatcaaatggtttagatctgaggtagaagacaaatttaggaaaagccagcaactgacgttgatgataacaactgtaggaggtatttttgtctttttaagacagtcctgagtggctccattagagtacatctagatttacctgtcttctgattattttccagtatccaagagttctcagaaaaatatttcccctgatccacaagcagagtttttctttcttatagtttggagctgaagttaaaatctctctctcctctacaggctgttgaattgtatgtaaaggcttgggactctggtgtggcacttaagtactttttatcaaccttcaggctttagacagtctcattgccttagcccacaattcctggaatctgtgaaggcaatttattctgaaaattccacttaccgaaaagtaacttcatttttccattaaacgaattgaagtttcaaactccttgtttattgctggtctaacaaggccattaatacgtcctgtcctctctgctttagtgatagcaggcagcttgcggactcccagctgcactggccagataaccagtgacagagtgtgtcatggcaggtgctagagtttcagagttgaacccaactaatttttgaaactttaatgattataatgaggcagtttccatgttttccaatcattgtttactcaaaggcctcctacagactatagaaacataaccggattccttgggtttttatagatggcaataacagaactagattaaagatgaatgtacagtgtccttaaccctttgttaattggttgtctctgaagaaaatgatttctgtgtgataacagtgatatctataaaaggggatatgactccctttgccatgttatcatgcttctctgtgggtgtatatcacctgtatctctacagatcctgcagcagtggttttgcgtggatatcatcttgagtattcccttttctttctctaggtgcatcagcatgcagctccacttgaagtatttgttttaaatgtctggctatgcaaaggacatttcagtgatgcaattaaaaatgattctgttgactaagcgggtactctattgcttttctaaagaaggcctttatttgtgaatagagacccactgtgataagtttctcctacctattggtgctgaggctgtatggattatgaggactctttattatgctccagcgtgctaccattctttatatctgaggaaatgcatctggaagatttcctgatgtatttctttctggcatctttctgtgttgggcagatacttatatgcttgcctgcatggagcccaggctttaaatattttttttcagtggaaactttactgttttaggtattagactctggaatctcacttcctgggtccacatcttaggtctgccatttactgtctgtgtgaccttgagagggtaggtaagtaacttacttactttctggaggcctgttttctcatccttaaacagagctcaagcaagttaatccatgaaggatacttagtcatcttcaaaaaaccataggtactctcttgctcctgtttctataggcctataatgagttatatggtaagtgttagctgctgttgtttttgttagtaataatagaaatatcattatatggtgaatccagcacagatttcagtgcatatttttgtcattactctttttattttaaaattcctgtaatcatctgttagctccatttggcattcactgagcacctgccctgtgcagagcactgtgttccctgtttaggagaattagaaagatggcaagattttgttcctctccttaagccttacagtctagtgaagataatctgccttgagtagggaagaaaatatgttcctcttttaggtattttaagcagttgtttttcctctcacttcagttctgaagattttaagattaaaaaccataaatggtttttgttgattaaaaggacaggaaggaaactccatcataacttacaggttatgatgatattgcattatgataactctgtgaccagtgataccatcttgagtttagagctgacccagagaagttaaactggcctaaggtcacccagctggtaaactgaaagagaaggcatctgaatctaggtaccgctgattaaaacccatgcttcttctgtaatactgtaatcccccttaaaggacttttgcagttattgacattttctcccagaaaaaaaaacttacataaaacattttttaaagtctccaggaacaaaatatgacaagcttctttgttatctgtaccaatggttagcagcttttcactgtcagaaaaatcttccttaggtctaacttaaatctgcatgatagtttaaaccagtgtcctcttgttttttccttagtagaaatagagaatatctgcatactattttgttctaacaactttaacgctaaagattaggggcagattgtttagaaatgaggaaatctgggctctaatagagcttttgccattaactagctgcgtggccatgggcaagtcagttatacttctctgtgccccctggtttccagcaaagcgaaagtactcctcagcctacctaatcatggagaattttttgagcacagaataagttaacatatgtaaaaatgtttggaaaagtgctttacaaattcaggatatgattattgatatgactgttaagaatttaatgttcattataatatgagcttgtaatgacaaatacgtattatatactgctactctccatccattacaagtggcagatattgttaaatcagtcatgacattctttcttggtgagttttgacatgaccattgccaatttatcagaattagcatgggaattgaaatctatatatcatcctgttataatatggtataataatctcccagcctttctttctcccgcttgaagagttctgctgtctagcaacagtgcctggtacataaaaagatactcagtacatgttcattgaccaaatacatggatgacattggttactctaatttttctttgtaaatcttgactctactctgaatgctaagtcctccatgtttttctttataaaacccagaatgtgaaaccttcctaattaagaattttgaatttgtgattttgagttttaagtacttttctgctatatttttcactctactttgattatttatttatttattgagacagggtctcactttgtcacccaggctggagtgcagtggcacgatcacagctctctgcagcctcaacgtcccaggcataaggaatccttccacctcagcctcctgagtagctgggactacaggcatgtgccaccatgctggctaattttttccttttagtagtgatggggtctctctgtgttgcctaggctagtctcaaactcttggactcaagtgatctcctgccttggcctcctaaagtgctggagttacagacctgagccactgtgcccagcctaaaaccacattttaaagaccaaactcagggccaggcatggtggctcactcctgtaatcccagcattttgggatgccaaagtgggcggatcatctgaggtcaggtgtttgagtccagcctggccaacatggtgaaaccctgtctctactaaaaatagaaaaattagccgggcatggtggcgcgcacctgtagtcccagctactcagcaggctgaggcaggagaatcgcttgaacctgagaggcggaggttgcggtgagccgagattgcaccaccatactccagcctgggcaactgagcaagactccatctcaaaaaaataaaaaacaaaataaagaccaaactcaggaatgtatataaaattttcccatgttccactcatccagatatttgattcccacctaaaactggacttagatatcgttacctctcagaataagctatcttctcattttcaaagcctgctacaattttattttaatttattttcattttattcttgaaggtaggtgattaattggctggttctgaaaggccatcttttgggtcacaagcctgaaaggcaaagtaagtaaacagtagcccgctcacctagtttgattaattaaatcacaaagaacttcaaaccatctctataagatagtaataaatttaatcacagttcataccttctgaaaaccttctttagactttccattattctgccttaaagggcagtgtggcattgctgattcataatctaggtcttagggtattttcttggcgttttttctcccctgatgtctgaagttcatttctaaccacattttttttttttttttcattttaatgtgactttttttctgtgatgtagcgtttactcattttttggtgtcarttgctgtttaataaacctaatacctttgcctagatcagagatgaaaatgttaactaggactaactaactgaccaggtcaccagctgttgctaaaataaatagtacatggttccttgtgttaacacttaatacattgataattattctactctctagagttaaatgcccccttatgggattcagactgtatttttccatatattatgatcatataaatatttagtaaacttaaaatctaaaactttgctaaaattaagaggttatttagattacttctccttgatctactatgtccgtcactctaaaagaagggaataagattcgtttgaccagacgcgttcttcacaaagcatgttgtctattgttctgtatgtgactacagtagattttgtgattatttttcatagatctagaataaattttgaaagtctttaatttacatcctctctctgctttttttaaaacatgacaccaaactggcccttttacaatcttcaacgctttacattctcttatgtaaagtcttgactgcaccgtgattgcaggcaactcatttaatatagtcatttctgttgattgatttattatattggagaatgaaagttttcagggccagccaatgtgaatgttttaggtcaatcattttgtgctgaattttctattttttcttaattccttgcccttgtgtctactgttgggctttctctttattcttttaattgttggaggtcaagttagtaggagctttgtttcatgcagtttatcagctattatctgctttcctttctctttaataaagggacatgtttctttgtctttctgtttatacaatttttttcatatttttttcccttgtagatattttcagatgtcaggatagtagaaagtgtgctggtgaagaattaaggatctgggtcccagattcagttctttcactggctgtgtaaccttaggcaagtcatttcagctctctgagcttctgtttcctcatctttaaaataaagaaattattatttcctatcctgacctacatttctctattctattcatgttcttgtatttctaaatttacacctcacattttcactatttctttgtgcttctcaatttgtcttcctactcttactagttttttcatatggcttaccattagaatctatttacttttattagaaagtgttaggaaatgtttcaggccgggcacagtggctcacgcctgtcatcccagcactttgggaggccgaggtgggcagattacctgagctcaggagttcaagaccattctggctagcatggcgaaactctgtctctactacatatacaaaaaaattagccaggcatggtggcatgtgcctgttactcaagagctactcaggagactgaggcatgagaattgcttgaacctgggaggcggaggttgcagtaagccaagatcacaccactgcactccaccctgggtgacagagcgagactccatctccaaaaaaaaaggttcagaattctgaactttccagattttagaaaggtaatatggtatctgtcttataacgccaaaatcagacacattaatatttctgcagcagagtgtgtgactgttcacactaaatgggatatgtaaagactataaatagcttcgtatcctttcaagttagatttgcctccatcgattaattttggccccaagctttaaagaaagcaataactttgttttcagaattgttttgattttggaattgtgtgttatgggcctgttatatttttctactgctctcggatctcttctcatattactcttaaagatttaagtttcacaccttattgaaaaattggagttctaataatttacttttctggtttcttcatttttccttgggatgtagaaccagattttgattgctttcatccattgcctttagatctcctcctaacttctccatgtttgtaagaatcaagaccatgctgccttcctaagaaattctggaatccattagacaaaccagttatcctttgtgctgtctcctagagaaccccagtgcagttcaaggcctgcctcagttccagggcattctctaccagccttcattttgcaatttgcagaccactgttttttgcctcttgtaactttgctgctatattcagataatgccacaagatggtgcccaaatagcagtgaatttctttttctcacatttccaagtgccagtcagcttcataactaacttctttgcccttaaagtacagtcaaatacagtataggaatgttgtaagggattctgctgatgaggaaagatatatcagaatagcaagtgtttattctgaattcatctcgatttctgtaatctccctggttcatgacttgctaaaccttatacaggcattatcaatttggaacagtaagaaggaagcatttaggcttaccatctatgatgtaggcttatccccattttatggtgtcaagataaatgactagccatgcaattggaactggtattgtggcacctaaaggagcgcttgggtcaccagactgttgtatggtccatattttctcagaccttggtgaaagtgttatggagaaccaagcttctatattaaaaattgaagatgaattatccagatttgtatattttttgtttttagaaatagttttagttttccatattgtaattgtatattccagaagatttctggctcctggaagtgctctgaaaatattgaaatgtggtttgcctctgaaatattttttcaataaagttttagagaggagatatgagtaaagcccaggggctaccatttccatttaagcaacaaaatagaagaatatcaatacatatccttgatacttattgaaatatttgtaaagatcagtaagctgagaataatgggcaattgtgttgaagcactaaacatagttgaaaagtagaatttaaatatgtattagcaagactagaatctgagtccctactagattctgacttattccatatacttctattagcctcagatattttttattatatagtagtaaatgtaatgacttacagtagtatcattttcacttacaaagcacttaggaaattaaaggaattaactcttgttatcaggtaagagagaccaggatatccacttgtctcatgactaaagtttgccttgtaatttggaytaagggaaagtcattggttatatgaagtagacaactgtggttaatactgctcttatttacagagagaaagcggttggaagccaagcaacgggaagacatctgggaaggcagagaccagtctacagtttgaacatcactcaatgaaagggataattccatgaatcagaaaatgtttccatagccttcagataagatgatccttccagagctctatgtacatgcagatgtgcatgttaaagagataaagtgatcgagacaaggactgactgggtatagaaggaagacagactcctgtcttcactcctaaatgcagttctttggaatcaccctactgtggtgggcgtagtagggagccatcagctaggaagaaacgtgggagatgtgaattccaagagttgcctggacagggcaagtcatgttagcgtgggtcacacttccaagatatttaaagcaaatacaaaacagaacagaggattcaaaccgcaagtatgggagatttaggccctgcagaggcagaccattccttagtatctcacaaagcagagtaatactggaggcagagtagggggtggttrgagagcagttagtacaaagaggcagaacagtgtctggtttacttggcatacacagaatctgcactgccggttccagaactscaaagttggtgaactacaggagatgtgggtatttagactccaaagtttatactgagctcagtgcctgggaccgctccagctgcactgcagccaggggggataccagcttcattcctcagagtaaaccaaccttgggagctgtgtgccagttccagtgtaagcagtaataccatgttgtaagagggaacattaaagcccattttatgacatatatcactgtggtgtttgttggtttttgtcattccaacaaagaaataggagagcagctttcttcttatcctcatgcctataaggctgtgcataagttaaatggatctgttgtttttattgaatcccagtgagtagagaattgatcatatctctgcctcagtatactacaaaagtgattatcctgggactgctatgtggtagctcctctccccttcatatcttccttgtacaccctcattccaacctttttcttgctttctgctatctctgcaaatctgataccctgaagaagacatgtggcacaccagcgtgttcttggtatgatcttctcaacctatgccagaagtacttggcaagcagcaccagaccatccgttacaatgacaagcagccaggataaaataaacacctctgggcagtgagagatttcctaaaggatgtggacaagtcaaagccatcaactcaggctttatccatctcatgtctgcattctcagtgtttttggaaagtagttctgcactgaagaaatggtagcactagaccttaggatgctgaggtggcaagaaatagtggctcattgtgctttcaactagggcaacggcctcatcttttaatgatttagtgcccatgacgatgatgaattattagcattacctagaacatggtggagtaggattctattcagatgtttctcaaatgaccctggccttggatcttgatccttacccaactatccctgctgctattgagatactacaaccttctcccagttcctcagcattgttttcctcattcgtggttggctctactagtgtcctttgttcatgttcagtgactccatgccaaatttagggattaagtaagttgttctcttgaccctctccactagtactttgtccaagtgcccctctctttggcctatagcaacaagactagtgctctctgtcttcatggaacagacttctctaagataggtctgaacagtgcagctccatttgaaaggaaatgcagggaattgcagcctgacttcatactgaatggtatacctctgagttatacctttgctctgctttgattcttcaaggccaagagtgaccttgggcagtacaaaagagatgactactcctgtcacttgcctgtgaggatgcttcttcctggctacactttagcttttaaaggcattgttaatggtaacatatagccccatgtttatttcccagttttcttgtaatcttcgtaatttcaataacttattttggttctcattctaatgctgtatgctagtagcctgtcctttttttcagccaatagtcagccacctctaactttccagatttatccttataaccagacccagagaaaggatttttttttaagcctacacttgaaaattatggagtgttgctgcttctaccattagtagagaatgtgctttttagttacattattcaagtagttgggattgatgtatgctagctggaggtaagagctcctgctatggcccagcacagactatattgagcttttccagatgggaattaaatccttgggcacatccaagccatgctttctcaagctgagttagctggagagcaccctgtagctgccactggtgcctttgttagatattcaggaagacagctaatgtactctgctgtgcatatgtgttgaacatctaaatctcaggattacctggaatttagtagaaaagtacatttcccattagttatgatatgctcttcatagagtgaaagtctttgtagtataaaggtaagttaggcttctgaagactaagctgacattcttagcaccttagtttctctgaggctaaagtatgctgagatgaaagtcttttgacatttttggttctacctggaatttggtggttggtattctgttaacattcctcatctagttataagtcatgccagccaccagtcttcccatgtccttccctttcagctcagagttgtaacagcacaacccttgtatggccttttccaagaattagaactggctgcacctatcaaacgtgtaatgtgggcagcaaggctgagaccagagccggtggctggctgcctggcctgtttttttggtccctcttagaaactggatccagcaagcagctgtgggtaacctccctgcttgaatctagtcatcagtcaccacatgctcccctgctagctgcacattctttcacagaccattagctgcatgtgtgagcataatgttgttactgtttgggggatgtttgctggatccaacaggaaatcagtccttcccttgtttacctaaactgccatgccaaaatataatgctccctctgcctaatgaaggagatgagggagttgaggagagggaaggtcggggataaggaagaaagcacttctttgtattcacagagggttccccggaacatgtccctttttactccctaaggagggggtagctcttgtgatgtggtggctcttgtgatgtggtgggggtagtgctgttgtaaatctgctccatctgctaccatttattttggcttcgcagccttgattataaaagtttgcaatcctcagactttaccttcttgcccctatccttcaccccttaacctttctaacccgtgtttcagctctaagcctggggaggctgactgggaagcagacttatgtctgattggagaaatgtagatgggcagtcatgagaagcatgtgtgccctgtgtatcccaggccctggctccatgggaggcaaaagggtaggtctgtggttctggggtgtgtacataatcacagctggtctggtctttgtagcagtccataatgagcaacttttattggcattagggtgtcagtcctgtaaggatcatcacttaagtgtgtctcagtggagaaaagatcaagaatcatgtcaagaagaccatggggttttattccacttgagcaagagcaaatcagagccccatcaagcaggaatggtggcctttcccaggttccatccttaactaaactgactgttcccccttctgatttctccacggtcttctgtctcttgctctgccaaacttgttttcttatctctgtagagatgagtggcttgtttgatgttctttccatggcaaaaatttattcaatgcaaagttcacttcagacacttggttgagacttgaagtttagaccaatcctgagatgcgtggtgatcctgagagagagcagactgcctgccaggtaaatggtccatattatttccttggcagaggccctgacaggggctggggtccgtgttacctcagcagtctttctgcttggcctactcttgctgctctgtaggaaggccctatctggccatttctgtgaaacttgccccttctcaagcactccgtaactgttggtgttggcccatcaggcaataaggggatgcccgaggtctgtgcttccaaggataatagaaacacccatgtgtgtggtaagataaaggtaaggacactaaagaacagagtgtgagaggtgagttctaaataacaacagatgaagaaaggattggatccaccagcttctctgccagttgtgattttgatacaagttgtgttgctttgagctcctagcagagagctaacactacctgctgtgtattttggtcctctgtcctatactcctccaagacatttgcaaagcaccacttagatgggggactgggccatagtccatccctaagaaactgagagctcctgaatcccggatctctgtggcaagattcagggatgactgggtttccttacagaagaggagctcagctaagcaaagcctggaggacatattccataggccacaggcccttaggggcaggcccagagccatcctgagggagcaataccatctggattggtgatcttgccatcaaaaggcttcctgagcaggttcttggtgccccttggcactggcccttttcctctgagttgggactctgtgaagggcatggctccaataagctgaggtatctggtgtatcggcagcagctaggagtgtgcagtgacagcttcagatgaggttgttcctgagacgctgttcctgctccagggagagttctgcattggctgggtatgaattccctgtgggccaaaggaaaacaggtaagtagccaacctttccagtctcatcccttccctgacaacttacatagatccactctgcccagctcatcctttatatcaagtcatggcatgggcacagacaccaatcattttatagaaataggcctgggacaggtgtgtggtttcaggaacatcaggaagaacaggctattgattggaaagagttgtgctagttattctcctttgcccccctccccaggttcattctctgcccttttttccctctgtgccctaggaagctgatgcctagcgattacatcactctggctcctttgtcctctttttttgtttgtttgagttgggtcaatggaaagcaacagcagaaggtcagagggtggaaggagagaggccggatattccttcccctactttggccctgtggttctggcagtgatggtctgtgactcctgttccagctaggttcaccctccttcacaactctggcttgcacctggctgcaaagcagcccttgcccctcttcaagcctaaagcagataacggttttctactttctttatgcttgatgtctcaacactccttgttttcttataaatagtcctttaattaaataaactcagactctcacccgagtgtgccttctgttttccgcacacttctgtttagccctgttggatcctaaacactggcaagaggacctgcaggactgcattatttttcttgcccttgtcactgcctgggaacccttgcagcctgattccagcattatggaggatctgctgtctccgtgtgcgtagccttggattccagttcctggttcctctcaatatccctgtttcatttaagtggcagcacaatctactcagccacacaaattcgaaaccttagactgttcttcctcttctcattttcgtccatctgttgccacagttattttttgaaaacctaaatgatcttttgcctccttgactgaaatttgtcaatagttcccagaagcccacgggataaaatccattatcttagaactatcacaaccctccctgcaaaaagctctagtacttagtaagtttgaagtatacagccccattttacaaaacagaaaactcaggtcgtgatttcctcactgtcctccagctagaaagtggtgggactggattcgggtgacgccttccaaagcccagtcctgtgctctttctctactcctcccatgtttgactttggctcctccttcaaacctcagatcaaatactacttctgtgaagcttgtgctagcccccaacaggttgctttctgtctgtgcttgctcagcattcagtccacacattagtagtattggggctatttgcatgtgtgcataccctatctgacacttacattcccagtttctggggcacagcgttcaacacaatagtgagccttagtaaatgtttgttgactgaatgaacaactctgccccatcccaccgcacatatgcaagtatgagtgaatgcatatcccatagcaaatatgggcatttttaacccttgaagatagagggagtctttactgacagaacagcccctcttctctgcccccactggatcatgatgcttcctttgactgatgctaccaatcctgtaagtggctctgttttccatggtccccttcttgcaagcagtgatcacagctggagacagcaacacagagcaagaggactacttttgcctgtgaggaccctaaccctaacttctatatgaaagagaaaggaaaaataatggacttgaaaatcctgacatggcttgaggtgacaggaaagattctagaacagattggaaactgagtttacaatcaaacagccttaagtgcaaacagggatgtagaagatgtagttattgggtgaagccgatggtctgaccagttctagaagt

SEQ ID NO: 97435 - DNA, 16076 bp, Homo sapiens
ttttttttgcgagggtgttgcccaggctggagtacagtggcacaatcgtggcttactgctgctgcctctaatttctggactcaagtgatcctcccacctcagcctcccaaatagctggtactacaggcatgcaccactgtactcagctaatttttgttgttgttgttgttgttgttgttgttttggttgagacagggtttcgctgtgttgtccaggctggtctggaactcctaggctcaagtgatcctcccgcctcagtctcccaaggtgttgggattgcaggtgtgagccaccatgcccagccaattctagcattttttaaaaaactgctgagatgatttctggtgtccttgagaattcttcaaattatctgaatattaatttctagcattgatatttagaacaaggtccttctgactttttttaagatatctttcaggctgggtgcagtggcttacccctgtaatcccagcactttgggaggctgaggcgggtggatcacctgaggttgggagtttgagaccagcctgatcaacatggagaaatcctgtctctactaaaaatacaaaattagccaggcctggtagcgcatgcctgtaatcccagctacgtgggaggctgaggcaggagaattggttgaacctgggaggcagaagttgcagtgagccgagattgtgccattgcactccagcctggtcaacaagagcgaaactccatctcaaaaataaataaataaatcctttcattgccgtatcatctaaaataatgccaatattctcactgattttgggggactgatgttggaagatgactcatggaattaagaggatcagatggttcaaagaatcttgccctatcaaagttgtttacagcctaaaaatatttgataaatgaaggtatgttcaaagccttctcattctccaaagcagtgctgctgagaatatgcatcttttagaaggcagtagatcccaaagaccaacataggatgttttacctagaagacaaattgtacattgggctttaaggactcatgaaaccattgcctgtttcagacgctgaccggaaaggagattgagattgacattgaacctacagacaaggtgatgcatgcccaactcctcttcatgtacttcttgccatgtgtatttgtttgcatatgcttatgaacttggtccttttgctctcatgctgtctgcatagcccttgttctttccgtttccatggtcctacccctaagcagcagcccctgactacttgtctctctaaaggtggagcgaatcaaggagcgtgtggaggagaaagagggaatccccccacaacagcagaggctcatctacagtggcaagcagatgtgagtttggagtgagaatgacagcatggcgatcttatgtgaagatgagaagaggagagggggcacgtactgaggtggatcaggggtgcctcttgtttttggtgcctaagactctttggcaatctggtgaagcctctaagccccttctcagaataagattttttcaggcataaaacaaaatatatagaattaaaggaaaactaattatattgaaatagttattaaaatactaaaacaaatttgtgatatagtaatatatgtacttttttattaatgcataagatctaatggtaggtctaatatgaccataattttgaaatattttcaagatacctataaatgatcatgatagaaaatagttaattgctattgttaacaagttacctatattgctaatactactgtggtttttgggctatgtttaaagttagaagaaatgttaaatttcagttgggggttagtaaaaataaagatgggattttttttctcattcaagttcacagacccccaaagagatccaggaaactcaagaactcctgttctggccgggcgcagtggctcacgcctgtaatcccagcactttgggaggctgaagggggtggatcacctgaggtcaggagttcgagaccagcctggccaacatggtgaaaccccatctttactaaaaatacaaaaattagctgggcgtggtggtgggcgcttgtaatcccagctactcaggaggctgaagcaggagaattgcttgaacccaggaggtggaagttgcagtgagctgagatcgtgccactgtactccagcctagatgacagagcgagactctgtcaaaaacaacaacaacaacaacaacaacaacaacaaaaaactcctaagtcttctttttcttttttttctggcttccttttcctgcaggaatgatgagaagacagcagctgattacaagattttaggtggttcagtccttcacctggtgttggctctgagaggaggaggtggtcttaggcagtgatggaccctccattttacctctttaccctgtcgctcataatgaggcatcatatatcctctcactctctgggacaccatagccactgccccctcccctggatgcccagtaatgtatgtctactggtgggagactgtgaggatcccaggattcagtattcctggcccagagggcccttgctggctactgggtgttagtttgcagtcctgtgtgcttccctctcttatgactgtgtccctggttgtcaataaaatatttcctggcctcctggaatctttcttctgttgcacaagttgactgaaataaaaatggacctaatgctcactcagttatagcaggctgaaggaatcggacagtggaaggaatggtgctcttacggggattatcagactctaggaaaacctacttagtggtgtgttggaaccagttcctagtggctaatgagagccaattattggcacctttttccaactctattaagtgacttcatgttggtagcttgaaattggccatggtaggattatttacagaaactagcaaacactacagatcagttcctccccacaaactggttgttatacatctaccagtgtagtgctgacatggatggtgaaaccttcggagagtgaattctctcttgactgtggctgtactggacatttaggcctggttggagaacgccttcaagggtttggctgacactgtactctatggctggaatattactgaggactttgggttctacactgtcaggaggttgataatgcagaaagattgagtgacaagctgtgatgtatcacttgggtctcaagaagaggcaggtgctagaagaaaaggctttccttcttccctggcttcttagtataatagaatcgggcaaggctgggtggagtggagaagtagggaggatgcccgtggccaatgccttagaaagacttgactgctgtggttgcatgtgtggtcgtgttggtacctcgctgcaatcctcttccccgcccagcatcagatggcactcttgcgccatctccaggctgatgacgccccgagtggcgacgctctagtcgccatttgtctatggcaggcagggtggctgccttagctgccggaggttccgcactctctaaggccccgggtgaagccccacctctgctgcgcgcagcctgcggtgcgggtcatggcgcggctaccgaagctggcagtctttgatttgggtgagggacgggaaggggagaatttcgtaaggtgctctccttttccacatccctaacagcagctcccgaatccctgcatctcccgccccaggctgaaccttccctctccttcctctcgcagattacactctctggcctttctgggtcgacacgcacgtagaccctccgttccataagagcaggtgaggtagggacagggaagactgggggcgagataggacccagccagggctgagcgcactcttgccctctccagtgatggaactgtacgagataggcggggccaagacgtccgactgtacccagaggtgcctgaggtcctaaaacgattgcagagccttggggtgcccggtgcggctgcttcaaggtaagaagagcgactgacaactgacagtgtaatgctgaagggtgcatgcaagagacagtgaaacccctggtctacaaaaataggggcggtgcaagtttccaagtatttacatattttttcccttgaacgctctcctgtgccttttaactattaaaaagtggggccagcaggcgggcgcggtggctcacgtctgtaatcccagcactttgggaggccgaggcgggtggatcacgagatcgggagttcaagaccagcctgatcaacatggtgaaaccccgtctctactaaaaatacaaaaattagcagggcgtggtggcacgcacctgtaatcctagctactcgggaggctgaggcaggagaatcgcttgaacccgggaggcggaggttgcagtgagctgagatggagccactgcacttcagcctgggtgacagagtgagacaatgtctcaaaaaaaaaaaaaaaaaaaaaagtggggccagacacagtgactcacacctgtaatcttagcattttgggaggcctaggtgggaggatcacttgagcccaggaatttgagaccagcctaggcaatagagggagaccctatctctaccaaaaaaaaaaaaaaaaattgtagtggcgtgcacctgtagtcccagctacttgggaggctgaggtgggaggatcacttgagcccaggaggtcgtgaccacagtgagccgtgattgggccgctgcactccagtctgggcaacagagctagaccctgtctcaaaacaaaagctaaaacattggcccagcaccaattgtgtcaaataggaaggcaatggagttaaacagaggctgaggatgcctgtccatcccggaaaaacagcaagttgatttccctggttatacttactaactttgcttaataagttaacgtagccctggcccttcactttgctaatcccatcttttacaccgttttgcaggacaagtgagatagaaggggccaaccagctactggagctctttgacctcttcaggtactttgttcatcgggaaatctatccaggcagcaagatcacacactttgagaggtatgcggagataagggaggagcagggtgagaaagtatcagagaggcctgggaaaccaagatactagcttggttactcctgccctgtcttgaataggttgcagcagaagactggaattcctttctcccagatgatcttctttgatgatgagaggcggaatattgtagacgtcagcaaactgggtactgagtgatgaggaacagccatttggggtccctaggagggattaggtagatacatacaggttggatagtttgccctataggtggcactcacaaaggtcagagtaataatggagaaccctgaaagcttaatgaaatgtgacttcttatctttctaggtgttacctgcattcacatccagaatggaatgaatcttcaaactctaagtcaagggttagagacatttgcgaaggcccaaactgggcctttgaggtccagccttgaggagagcccatttgaggcctaaactgaaaggaaatcaagaaggcattttcaggtgcatttgtaatttattaaagttcatctgtgtgtgacagaagagattttacccacagtgtggggagtttctatttttctagcctgtgaaatggggttggttgtcctgaggtgcagagaccagaatgtgagacattagactgcatcaggtttgccatctaaacttagggcaaccccaagtgcttgaacctataccaccccactttcctgagctctgtaaagagcatgaagttttcccactgaccccatacactgaggtgccatcacactgcacatttccttccggagaacaagcacgtactcaggtggagatagaactgtctttttacttaatagaaaatgatgtggcagctttaagaggagcgcgtcggtctggggctggtggcttgggtcacgtgacaccggtggtctcgtttgcgcctcttgatgtcgcggcggcgccctgaggacggattgggcaaggctggtccctgtgtgatgagacatcaccctcccaggagcaaggcggaagtctggaggacgctgaggggcggaggcgggagaggcgagctcgcgatgagtggtctcggcaggctcttcgggaagggtgagccagggtgggactggccagccaggaggcgcwggctggtgcaggggaagaggagaccccggcgagattcggccggaccgctgcgccgggcaggggaagagaatcaggagacaggctgactggaaaaccccggcggccgatggcggagcaaggctcatcgccggtgccaaaaggcacaccatgtcggggcgccttgttcccgtccgccgtcctcccccactctcagagggaagaactcaagatctgggaggggacttgagttgagggcgtggcgatcgtgctgactcccactgttcaggcttgaagacgagtttcctgctgtcttcagccattttcaaaaccttgttctataatactttgtgctgggcaagagggatctaaggtgaagaagaaagactgccttcttagcccggcgcgggggctcacgcctgtactcgcaacactttgggaggccgacgtgggtggatcatgaggtcaggagtttgagatcagcctggccaatatggtgaaaccccgtctctactaaaaatataaaaattggccgggcgcggtggctcacgcctgtaatcccagcactttgggaggccgaggtgggtggatcacctgaggtcaagagttcgagaccagcctggacaacatggtgaaaccttgtctctactaaaaatccaaaaaaaaaaaaaaaaattagctggttgtggtggcacgcgcctgtagtcccagctactcggggaggctgagacaggtgaatcgcttgaacccaggaggcggaggttgtagtgagccaagattgcaccaatgcactccagccttggtgacagagggagactccattctcaaaaaaaaaaaaaaaaattaggtgggcatgatggtgtgtgcctgtagtcccagctactcggggaggctgagrcaggwgaatcrcttgaacccrggagrcggaggttgtagtgagccaagattgcaccaatgcactccagccttggtgacagagggagactccattctcaaaaaaaaaaaaaaaattaggtgggcatgatggtgtgtgcctgtagtcccagctactcagggaggctgaggcaggagaatcacttgaacccgggagacggaggttgcaatgagctgagatcatgccactgcactctggcctgggcaacagagcgagactctgtctcaaaaaaagaagtcctggcgcggtggctcatgcctgtaatcaaaacactttgggaggccgaggcgggcagatcacctgaggttgggagttcgacaccagcctgaccaacatggagaaagcctgtctgtactaaaaacacaaaaaattagccaggcatggtggcacatgcctgtgatcccagctatttgggaggctgaggcaggagaattgcttgaacccaggaggcggaggttgaggtgagctgagatcacgccattgcgttccagcctgggcaacaagactgaaactctgcctaaagaaaaaaaaagaaaggcagctaggaatagtaaaaagaatattggttttagaactcatactgccacatcttgattcctgcacaatctcttattagttgtgatttttaacatctttgtggttgttttcacatttttaaagtgaagagatagcacgttcattgtagagatttggggattagcaataacacagtcaggtctctagcacatactatgtattcaatgattggtggctaatatttttccttcacaaaatttgggcctactccactggactcctcagggaagaaggagaaagggccaacccctgaagaagcaatacagaaactgaaggagacagagaagatactgatcaagaaacaggaatttttggagcagaagattcaacaggagctacaaacagccaagaagtatgggaccaagaataagagaggtaatgagggaaacaagcctatggggagggcccagatgggaagcaggtgcttctgactcttgatgttcagggtatgggctgggtcagctgccctacaggctttgcggaggaagaaaagattcgaacagcagctggyacaaactgacgggacattatccaccctggagtttcagcgtgaggccattgagaatgccactaccaatgcagaagtccttcgtaccatggagcttgctgcccaaagcatgaagaaggcctaccaggacatgtgggtacggggggaggggtggaggggacccaggcactgggaagagtggcttgctatcacactttaaactttaaagcctctcagaatgtgaatttgcagtatagatacttgtgatggctagacatccatctgccccttgcttcctataaaattctttcgctgcctggggcattctagggaggaaagatgccttctctaattctttttttgttttgttttgttttgttttttgagatggagtcttgctctgtcgcccaggctggagtgcagtggcacaatctcggctcactgcaacctccgcctcctgggttcaagtgattctcctgcctcagcctcctgagtagctgggattacaggtgtgcactactgtgcccagctcatttttgtatttttagtagagatggagttttgccattttggccaggctggtcttgaactcctgacctcaggtgatccacctgccttggcctcccaaagtgctgggatcacaacttgcatctttgcaattttccagggatctcttctgattgatagttatgggcttatcagtgtgaccctgcaaggcaggaggggtttcattcatgtgagatgagaaagtcaagggggcattgttgcrtgatttcttagctatctatctcattctcagggacattgacaaggtagatgaactgatgactgacatcacggaacaacaggaggtggcccagcagatctcagatgccatttctcggcctatgggctttrgagatgatgtggatgaggtgattgggggtgaagggtcagggaatattgcagaaagtatgggactggccagaaggaacacccaagagaggctcttgggacaagtttgggagggaacttcaaaagtggtatgtttttggaggtagaagtttttttcttcatctaaagtggtcttgtcttccctatccaggatgaactgctggaggagctagaggagctggagcaggaggaattggcccaggagttgttaaatgtgggcgacaaggaagaagaaccctcagtcaaattgcctagtgtaccttctactcatctgccggcagggccaggtatgcagggttgttctgttgtcttgaggacttaagagggtgggagagatatggggaaagattattcctcatccatcctgcctcaaaggagccacacagaaagggctgctgctgcagttgtgcaggttgttgactgcatataggcacccacctagcctgtgcttcactcaacaagccgtgtaccctggtttagggctgcaaatggcaggagcaagaggcaccatttttctaatttgcacaaaggtgctgtgggattgaacagcagcctagcaagcagaargaccatacctttaggttttttgctggggagacagaattcagcaggctctgaatgtcatagcaggggatggttggagttgctgagaccttactgcttctcctttcttttctctgggtatctttgtcctcaaagctcccaaagtggatgaagatgaagaagcactaaagcagttggctgagtgggtatcctgataaatctgggcttgtcttcctaatgctacctttgttggtcctttcttccttaagtgccaagtgctgagctaaaggaggataactttttggggaagtcatgctgagggtggtagtgtgaccctgcctgaaaaaagggtytcttaccctcccagccctggctcaactctgaagaaggatcttgctacagaaggagcccttgggctcccttctctttgatagcagttataatgcccttgttcccaataaaactgggcagatggaatcctagtgtctatactgccttgtctacccctgaagctgttcccctggcccttggagccttatttcaagcaatgaataattagagcaaagaaggggggttggaacatagaacaaatgggcattcctagtatctcaacctatgttccaggcaaacattatttcatctttcaagccggtttgtcctagagttgcctagttgctgaggctgaagaaactgccatctaccacttagaaccacgtggaggcatctctgagtcttccctcattgctttcccctggtcgtgcctctgccaagacagccccaaatttcttttacaaagcccattttcaaggacaaggagggagaataccatggaaggagcaagtagctttgctacttggaatggaaggagcaagtagctttgctacttggaatggaaggagcaagtagctttgctacttggaatggaaggagcaagtagctttgctacttggaatggaaggagcaagtagctttgctacttggaatggaaggagcaagtagctttgctacttggaatggaaggagcaagtagctttcctttatccagaacccatagttagtagctttcactactagaaggcttggtttgaattctgtgtctgggaacaattgtgtgagaagccttgtctccctgctattgtgtcagtagtggttaaggtgacactggaagagggaaaaggaaccaaggtacttcatacacccgaatacccatttcttttcttttctttttttttttttttgagacagagtctcactttgtcgcccaggctggagtgcagtggcgcgatctcggctcactgcaacccctgcatcccgggttcaagtgattctcctgcctcagccaggtgccactatgcccggctaatttttgtatttttcatagagacagggttttgccatgttggccagtctggtctcgaactcttgacctcaagtgatctgcccgcctcggccccccaaagtgttgggattacaggcgtgagccaccgcacccagctcgaatacccatttctaaaagaactaacagtgccattactttggactatagacaggcagagccataatcaaagtggaagaaccagggcttttaccccactacttgagcatttaaacagcacaaagatgtaaaataatgagcatatgttgagttgaataataaagcttcccaaaatagagcgttaatctgagcaccccatcccctaagagccacatcatgaattacactattgatttaacacagtgtcaagattattggttacaggctctgggcagaaatctatctcttactccagcagtgttccctgctataagattgccttgagaaaagaatgtctttgaccctagttgatgaaactaaatcagacttagatttatttttggtaaaaaagatttttagcccaagacctcctgctttgctcctctcttagccccctccctcagccattttcaggtcgtaatttgcaaggattggtgctgtttagtggtgttgtggagctggcacatggcctcaagcagcctgatctcatgggtgggttgctcaggctggaacttgagcacccaggaatccttgatgatgtccagaatggtggcacgcttagtggcttggcgtagcatctggaggatcaggttctagagcaggggagagagaggtcttgcctgagtttttctccattgtgccacacaggcaatgagcagttggacctaagaaagaagcaggatagcccatcataccactctggtcaaagtgggtgtggctctgattttatcttggagacccaggcagttaactccctggaggggaagggaagagttccttgggaggaatgctttccatatttcccttctggcctaaagagaaagaagctggaacctgtgtatcaggcaaggtttggagcctagtggttggccctttatgccttccatactgtttattataggacaggagctagtgtgtgagatggctctggtgtgggaagagcctttccccagggttgggaggcctaggttgggtgacctaggttggatattcacccctccctgtgggtcatccctgaaggctcagccctccttaggtagccagtaccttgcactcctgggagatggtatggttagctgggaaagtgacctccttctgagtctctcttagcagctttttgagattggtgtcatcaaagggcagatgggcgaccactagagtgtaaaggatgacgcccatgctccaggtgtcagacaggaaagggttgtagggcaagcctcgtaagatctctgggcaagcgtaagcaaagctgccacagtaagtctggctgaggtgggaaaagcagttcacttggcggtaagaagggctacaacccacaggctggttagaaggcaccatcttggcaaagccaaagtctgatatcttcacattctcccacttgtccagcaacaggttctccaactttaagtccctaccagcagcagaaaggctgggcatcaggctggggagagggcttagttttagactgggagctgaagggccaggggtcagagggtaaagatgaggacagaggaagtgggaggtagaaaccattatgagggcacaaggtagagaggaaggaaagccatggagttgtgagcagagcccaaagtagggagagagacagaggatggtatctgaggaccaccgggagctcaccattgtatttcataaaatgctttgcatacagtgagtactttatcagtatccttgaccatatgattaaaatagagtgcatgaataggctagatattgaggagggagttcgaaagaggaaaaaaggacaggaaatgggagatgtgcataaaacccccttgagggcaaaggccccagtctgggtggcagcgccctcaccggtgcacgatgctcttgctgtgcaggtaggcaatgcccagggtcagctgggagaaccacttgccagcaaggggctcagagcaggccccgtagcgctggatccattcaaggacatcaccaccctgagccagttccagaatgatgtatactcgagatgtgctctcaatggcccgatagaagttgatgaggtacttgtgccgcaagactttcattacctgaccccagaagaaggacccatcaaacctgggaagggagaaccctgactgcactcccagccgtctcctaccctcagctactgacttaggactttgcaataggatcagcccctcaaccccagagaactggtggcctgtgggcaaatgctatgttttgtgcctttactttttggggactgaaggtgagtgggtggatgggaaagaggtttaacttacataaagtttcctagctgcttagtgagacatttcagttctggtttaggggtttctggccccacccctcctggccataccccttctgagaaacctcaagcagcttagtaccaagctccagttccctcttccagccccctttccaacctgtatttcacggggcaggaacttgttaagatagtcatcagaggccttcttctttgagatgatcttgactgccaccataaccttctgctttgtgtagaaagcctcatataccgacccataggagccatggccaatggccttgcccacctcataaccatattcatccatgagggaatggtaggctgtggtggttggtgctgcctctaagacatctcccttccccatggtgttgggcttgctgagagcagggagctttactacttggaagcctcctatccaaaggccaacaccttgagctgctgaaggctagggtatcaaagtgaagtaggtccccaaatgcttgcctatatagtcacacgagtctgggatgctggactcagccctccactaggaacttggagggggaaagaaagagaagcagttctttttgtctccactggctgttgttactttctccttttggttacggaactcctcaaggtcccatgttccgaatacatcacaatccacctcctatccatcgttggccacaaaacttgagaatgaagtgcggccgggcgcggtggctcacgcctgtaatcccagcactttgggaggccgaggcgggcggatcacgaggtcaggagatcgagaccatcccggctaaaacggtgaaaccccgtctctactaaaaatacaaaaaattagccgggcgtagtggcgggcgcctgtagtcccagctacttgggaggctgaggcaggagaatggcgtgaacccaggaggcggagcttgcagtgagccgagatcccgccactgcactccagcctgggcgacagagcgagactccgtctcaaaaaaaaaaaaaaaaaaaaagagaatgaagtgcagttggaaacgtactcattcccagaggcaccttccacagtctggtgaaactcctaaagatcagccctttcattgatatatgagtacctactaagtaccagacactgtgctgaatacttggataaaatgtcacccaaatgtcatgccagacccttcctccttcctcaatccctacatacaatctttcatcaaatcctgtctctgctatctcctacttatctctttaatgatacactcaaggctttccgagcccattgcagcccccttagttcaataaggccaatagagacactatgatcctaaagcttataatgcagcatgagaaatacgagtgtgaaagtattaccattgtaaggtattgaacatgttctaggaaaatctaaccttgaaatgcatccttatcttctatgagccagaactctctagttttcctccacatccttctggtcactcctcagccttcactgaagttatatctttctctatccatcccttaatcatatcccaagtgttacatcacaagctttattttctcaaaccttcacatcctcccttaatcttgtccatacccatggtgtcaatactacatttatgctgactgctcctaatttcatctccatcccatatatctggagtttagatagagcagccagtattacgtggccatgtctgccccaggcatggaacttaccatatccatctcaaacttaaccatatcaataattgaacttattttcttctctcagacttttctgtgagttgtacactaatcacccttaatttagacactcatatgtcatcccagaccctcctgcctcagtccctacattcaatctatcacgaaatcctatctcttatacctcctgattctctctttgataatattctcatggttttctgagcccactgctaatcccttagttcacgcctccatcatcgaacagatggcccccgccagccttctgctccactccagtctgtccatcccaagtccaaagcataaatctgattttatttccatttgaaacaattcagtgtctccccattctctttaggatcaagtccatccaaattctttcacacagctttaagtctgatcctgcttacctccccaattttattttttaacacacacgtaatgatccacaactgcttttctgtatttgtggcaaactccaaatcttccttgagaacttggcataggaccttttttctctttttttttttttgagatggagtttcgctcttgttgcccaggctggagtgcaatggcacgatcttggctcactacaacctccaactcctgggttcaagcgattctcctgcctcaccctccctagtagctaggattacagacatgcaccaccacgcctagctattttgtatgtttagtagagacagggtttctccatgttggtcaggcaggtcttgaactcccgacctcaggtgatctgcccaccttggcctcccaaagtgctgggattataggcatgagccaccgcgccccgtctgtttttgttttgagatggagtttcgctcttgttgcccaggctggagtgcaatggcacaatctcggctcaccgcaacctccacctcccgggttcaagccattctcccgcctcagcctcccgagtagctgggattacaggcatgcaccaccacgcctggctaattttgtattttttagtagagacggggtttctccatg

SEQ ID NO: 97436 - DNA, 15767 bp, Homo sapiens
tggtataaaaaatggaaaatacagaaaagcataataatgtaattaaaatcacccataattccactgctcaagttaaagcattaatatactgtatatacccttccaagctttttggagagcatatagatgcatgtgttgtttttacaaaattttaattatactctatatactataacttttttgttaaattatcagcatattgttaatatattacaaatagttatcctaaacattgtttgagggatttgtaattttttttctatgattgtaccataatttatttaaccctcaactgtttgatatttagattgtgtttctaattttacagtatcaaaaggttgcaataaccattgttgtaggtatacttttggacatagtcatgagtattttcctggaagtattgttgctgggacaccatattgccaaattgctctctagatatatttatgggcctctacagtcgatttcagaaacaaagggccagctctagacttttagaatttacaaaccaataatcctttttaaaaatataaggtccaagcattttgctcttgggagagcagctctaggtcttctctgagagtcttttttcactctttaaaaatttgtggtcgggtgcggtggcccacatctataatcccagcactttgggaggccgaggcaggcagatcacctgaggtcgggagttcaagaccagcctgaccaacatggagaaacccttctctactaaaaatacaaaattagccaggtgtggtggtgcatgcctgtagtcccagctacttgggaggctgagataggagaattgcttgaacctgggaggcagaggttgcagggtgagctgagattgtgccgttgcactccagcctgggcagcaagagtaaaactccatctcaaaataaataaataaataaaaatttgtattatcggccaggcacggtggctcatgcctataatcccagcactatgggaggctgaggcaggtggatcacttgaggtcaggagttcgagaccagcctgggcaacatggcaaaaccccatctctactaaaaatacaaaatgtagtcaggcgtggtggtgcccgcctgtgatgccagctactcaagaggctgaggtggggatcacctgagcccagtatgtcgaggctgcggtgagccatgattgcgccattgcactccatccgggtgagactgagaccccgtctcaaaaaaaaaaaaaaagaaagtgaaataatttgtggacaacacagaattacaaactttttattttgtctttttaaagttaccacaaattgtcaccaccattctctgaaaggacattaacacctgaatatatttagtttcatgaaaatttcacttttaacactgcttttctcattttaccataggctgctgaaaattttcacacagaccagcataggttagggtagaagcttgagaatcactgctgtaatttattctttcatatccaaacaggttaatccaaaggaattgttcttgtatttttggaaacatactagtactaaatcattctccttgttgggaaattttctgagttcttgtttcgtgctgttctatgtgaataccataaggagaaaccatatgttattttgtgagctactataggagtgtacattgggtcccaatactagaccagccagactcaggtaggacggagtacagaaataaaagcacaggctctgggaccagggaatctggatccaatctctacttttgattgcgtagatgtgtttttaacctaaggcttatttttctcatctataaaatggaaatagtaatagtccatatctcataaatactgggaggattaaatgtgatgcatgtaagatgctgatcatagttactgacccttagaaagtgttcaatggctgggcaaggtggctcatgcctgtaatcccagctctttgggaggccgaggcaggaggatcacttgagcccatgagtttgaaaccagcctgagcaacacagaactcgtctctacaaaaaaatcttaaaaatagctgagtgtggtggtgcacacaccctgtagtccttgctacttaggaggctgaggtgggagggttgtttgaacccaggaggtcaaggctgcagtgagccaggatcacaccactgaactccagcctgcttgatacagtgagaccctgtctcttaaaaaaataaaaggaaaaaaatagttttcagtaaatgttagctgtgattataatatgatcatcagtatatttagcccttcaaaaatattcattgactgcttgtgtgtcaaacactaggaaagtttaacacttaaacaactagctgtaattggtatattaatattggaagtattaataaagtacactgggaacaggtctacacatcatacaggaggttttatacattgctggagtgcaatggcacaatctcagctcaccgcaacttctgcctcctgggttcaagagattctcctgcctcagcctcctgagtagttgggattacaggcatgcgccaccacgcctggctaattttgtattttttaatagagaaggctttctccatgttggccaggctggtcttgaactcccaacctcaggtaatccacccacctcagcttcccaaagtgctgggattacaggcatgagccactgtgcccggccaggaggagatcttacatttaaggggtcttgaagtttggagaagaaggggaggatattgcaacaaggaaaataacggaagcaaagaaatgcccataaattagaatgagcatggtgtgtttgtggcctggatcactgtagactaatacagatagagctattaagagcaaggacagatgggagaagacacaacatttatgactgcataatcagtataattattgtatttggatatcaccagcccttaacttacggaagaagacaagagctgcaatttaggatttaggtagaagtctggaaagatatgggagatgtaatgttgacttcttgtcttcttttctcttttttcttttactttcttttttttttttttttttttttttttgcgagggtgttgcccaggctggagtacagtggcacaatcgtggcttactgctgctgcctctaatttctggactcaagtgatcctcccacctcagcctcccaaatagctggtactacaggcatgcaccactgtactcagctaatttttgttgttgttgttgttgttgttgttgttttggttgagacagggtttcgctgtgttgtccaggctggtctggaactcctaggctcaagtgatcctcccgcctcagtctcccaaggtgttgggattgcaggtgtgagccaccatgcccagccaattctagcattttttaaaaaactgctgagatgatttctggtgtccttgagaattcttcaaattatctgaatattaatttctagcattgatatttagaacaaggtccttctgactttttttaagatatctttcaggctgggtgcagtggcttacccctgtaatcccagcactttgggaggctgaggcgggtggatcacctgaggttgggagtttgagaccagcctgatcaacatggagaaatcctgtctctactaaaaatacaaaattagccaggcctggtagcgcatgcctgtaatcccagctacgtgggaggctgaggcaggagaattggttgaacctgggaggcagaagttgcagtgagccgagattgtgccattgcactccagcctggtcaacaagagcgaaactccatctcaaaaataaataaataaatcctttcattgccgtatcatctaaaataatgccaatattctcactgattttgggggactgatgttggaagatgactcatggaattaagaggatcagatggttcaaagaatcttgccctatcaaagttgtttacagcctaaaaatatttgataaatgaaggtatgttcaaagccttctcattctccaaagcagtgctgctgagaatatgcatcttttagaaggcagtagatcccaaagaccaacataggatgttttacctagaagacaaattgtacattgggctttaaggactcatgaaaccattgcctgtttcagacgctgaccggaaaggagattgagattgacattgaacctacagacaaggtgatgcatgcccaactcctcttcatgtacttcttgccatgtgtatttgtttgcatatgcttatgaacttggtccttttgctctcatgctgtctgcatagcccttgttctttccgtttccatggtcctacccctaagcagcagcccctgactacttgtctctctaaaggtggagcgaatcaaggagcgtgtggaggagaaagagggaatccccccacaacagcagaggctcatctacagtggcaagcagatgtgagtttggagtgagaatgacagcatggcgatcttatgtgaagatgagaagaggagagggggcacgtactgaggtggatcaggggtgcctcttgtttttggtgcctaagactctttggcaatctggtgaagcctctaagccccttctcagaataagattttttcaggcataaaacaaaatatatagaattaaaggaaaactaattatattgaaatagttattaaaatactaaaacaaatttgtgatatagtaatatatgtacttttttattaatgcataagatctaatggtaggtctaatatgaccataattttgaaatattttcaagatacctataaatgatcatgatagaaaatagttaattgctattgttaacaagttacctatattgctaatactactgtggtttttgggctatgtttaaagttagaagaaatgttaaatttcagttgggggttagtaaaaataaagatgggattttttttctcattcaagttcacagacccccaaagagatccaggaaactcaagaactcctgttctggccgggcgcagtggctcacgcctgtaatcccagcactttgggaggctgaagggggtggatcacctgaggtcaggagttcgagaccagcctggccaacatggtgaaaccccatctttactaaaaatacaaaaattagctgggcgtggtggtgggcgcttgtaatcccagctactcaggaggctgaagcaggagaattgcttgaacccaggaggtggaagttgcagtgagctgagatcgtgccactgtactccagcctagatgacagagcgagactctgtcaaaaacaacaacaacaacaacaacaacaacaacaaaaaactcctaagtcttctttttcttttttttctggcttccttttcctgcaggaatgatgagaagacagcagctgattacaagattttaggtggttcagtccttcacctggtgttggctctgagaggaggaggtggtcttaggcagtgatggaccctccattttacctctttaccctgtcgctcataatgaggcatcatatatcctctcactctctgggacaccatagccactgccccctcccctggatgcccagtaatgtatgtctactggtgggagactgtgaggatcccaggattcagtattcctggcccagagggcccttgctggctactgggtgttagtttgcagtcctgtgtgcttccctctcttatgactgtgtccctggttgtcaataaaatatttcctggcctcctggaatctttcttctgttgcacaagttgactgaaataaaaatggacctaatgctcactcagttatagcaggctgaaggaatcggacagtggaaggaatggtgctcttacggggattatcagactctaggaaaacctacttagtggtgtgttggaaccagttcctagtggctaatgagagccaattattggcacctttttccaactctattaagtgacttcatgttggtagcttgaaattggccatggtaggattatttacagaaactagcaaacactacagatcagttcctccccacaaactggttgttatacatctaccagtgtagtgctgacatggatggtgaaaccttcggagagtgaattctctcttgactgtggctgtactggacatttaggcctggttgragaacgccttcaagggtttggctgacactgtactctatggctggaatattactgaggactttgggttctacactgtcaggaggttgataatgcagaaagattgagtgacaagctgtgatgtatcacttgggtctcaagaagaggcaggtgctagaagaaaaggctttccttcttccctggcttcttagtataatagaatcgggcaaggctgggtggagtggagaagtagggaggatgcccgtggccaatgccttagaaagacttgactgctgtggttgcatgtgtggtcgtgttggtacctcgctgcaatcctcttccccgcccagcatcagatggcactcttgcgccatctccaggctgatgacgccccgagtggcgacgctctagtcgccatttgtctatggcaggcagggtggctgccttagctgccggaggttccgcactctctaaggccccgggtgaarccccrcctctgctgcgcgcagcctgcggtgcgggtcatggcgcggctaccgaagctggcagtctttgatttgggtgagggacgggaaggggagaatttcgtaaggtgctctccttttccacatccctaacagcagctcccgaatccctgcatctcccgccccaggctgaaccttccctctccttcctctcgcagattacactctctggcctttctgggtcgacacgcacgtagaccctccgttccataagagcaggtgaggtagggacagggaagactgggggcgagataggacccagccagggctgagcgcactcttgccctctccagtgatggaactgtacgagataggcggggccaagacgtccgactgtacccagaggtgcctgaggtcctaaaacgattgcagagccttggggtgcccggtgcggctgcttcaaggtaagaagagcgactgacaactgacagtgtaatgctgaagggtgcatgcaagagacagtgaaacccctggtctacaaaaataggggcggtgcaagtttccaagtatttacatattttttcccttgaacgctctcctgtgccttttaactattaaaaagtggggccagcaggcgggcgcggtggctcacgtctgtaatcccagcactttgggaggccgaggcgggtggatcacgagatcgggagttcaagaccagcctgatcaacatggtgaaaccccgtctctactaaaaatacaaaaattagcagggcgtggtggcacgcacctgtaatcctagctactcgggaggctgaggcaggagaatcgcttgaacccgggaggcggaggttgcagtgagctgagatggagccactgcacttcagcctgggtgacagagtgagacaatgtctcaaaaaaaaaaaaaaaaaaaaaagtggggccagacacagtgactcacacctgtaatcttagcattttgggaggcctaggtgggaggatcacttgagcccaggaatttgagaccagcctaggcaatagagggagaccctatctctaccaaaaaaaaaaaaaaaaattgwagtggcgtgcacctgtagtcccagctacttgggaggctgaggtgggaggatcacttgagcccaggaggtcgtgaccacagtgagccgtgattgggccgctgcactccagtctgggcaacagagctagaccctgtctcaaaacaaaagctaaaacattggcccagcaccaattgtgtcaaataggaaggcaatggagttaaacagaggctgaggatgcctgtccatcccggaaaaacagcaagttgatttccctggttatacttactaactttgcttaataagttaacgtagycctggcccttcactttgctaatcccatcttttacaccgttttgcaggacaagtgagatagaaggggccaaccagctactggagctctttgacctcttcaggtactttgttcatcgggaaatctatccaggcagcaagatcacacactttgagaggtatgcggagataagggaggagcagggtgagaaagtatcagagaggcctgggaaaccaagatactagcttggttactcctgccctgtcttgaataggttgcagcagaagactggaattcctttctcccagatgatcttctttgatgatgagaggmggaatattgtagacgtcagcaaactgggtactgagtgatgaggaacagccatttggggtccctaggagggattaggtagatacatacaggttggatagtttgccctataggtggcactcacaaaggtcagagtaataatggagaaccctgaaagcttaatgaaatgtgacttcttatctttctaggtgttacctgcattcacatccagaatggaatgaatcttcaaactctaagtcaagggttagagacatttgcgaaggcccaaactgggcctttgaggtccagccttgaggagagcccatttgaggcctaaactgaawggaaatcaagaaggcattttcaggtgcatttgtaatttattaaagttcatctgtgtrtgacagaagagattttacccacagtgtggggagtttctatytttctagcctgtgaaatggggttggttgtcctgaggtgcagagaccagaatgtgagacattagactgcatcaggtttgccatctaaacttagggcaaccccaagtgcttgaacctataccaccccactttcctgagctctgtaaagagcatgaagttttcccactgaccccatacactgaggtgccatcacactgcacatttccttccggagaacaagcacgtactcaggtggagatagaactgtctttttacttaatagaaaatgmtgtggcagctttaagaggagygcgtcggtctggggctggtggcttgggtcacgtgacaccggtggtctcgtttgcgcctcttgatgtcgcrgcggcgccctgaggacggattgggcaaggctggtccctgtgtgatgagacatcaccctcccaggagcaaggcggaagtctggaggacgctgaggggcggaggcgggagaggcgagctcgcgatgagtggtctcggcaggctcttcgggaagggtgagccagggtgggactggccagccaggaggcgcwggctggtgcaggggaagaggagaccccggcgagattcggccggaccgctgcgccgggcaggggaagagaatcaggagacaggctgactggaaaaccccggcggccgatggcggagcaaggctcatcgccggtgccaaaaggcacaccatgtcggggcgccttgttcccgtccgccgtcctcccccactctcagagggaagaactcaagatctgggaggggacttgagttgagggcgtggcgatcgtgctgactcccactgttcaggcttgaagacgagtttcctgctgtcttcagccattttcaaaaccttgttctataatactttgtgctgggcaagagggatctaaggtgaagaagaaagactgccttcttagcccggcgcgggggctcacgcctgtactcgcaacactttgggaggccgacgtgggtggatcatgaggtcaggagtttgagatcagcctggccaatatggtgaaaccccgtctctactaaaaatataaaaattggccgggcgcggtggctcacgcctgtaatcccagcactttgggaggccgaggtgggtggatcacctgaggtcaagagttcgagaccagcctggacaacatggtgaaaccttgtctctactaaaaatccaaaaaaaaaaaaaaaaattagctggttgtggtggcacgcgcctgtagtcccagctactcggggaggctgagacaggtgaatcgcttgaacccaggaggcggaggttgtagtgagccaagattgcaccaatgcactccagccttggtgacagagggagactccattctcaaaaaaaaaaaaaaaaattaggtgggcatgatggtgtgtgcctgtagtcccagctactcggggaggctgaggcaggagaatcgcttgaacccgggagacggaggttgtagtgagccaagattgcaccaatgcactccagccttggtgacagagggagactccattctcaaaaaaaaaaaaaaaattaggtgggcatgatggtgtgtgcctgtagtcccagctactcagggaggctgaggcaggagaatcacttgaacccgggagacggaggttgcaatgagctgagatcatgccactgcactctggcctgggcaacagagcgagactctgtctcaaaaaaagaagtcctggcgcggtggctcatgcctgtaatcaaaacactttgggaggccgaggcgggcagatcacctgaggttgggagttcgacaccagcctgaccaacatggagaaagcctgtctgtactaaaaacacaaaaaattagccaggcatggtggcacatgcctgtgatcccagctatttgggaggctgaggcaggagaattgcttgaacccaggaggcggaggttgaggtgagctgagatcacgccattgcgttccagcctgggcaacaagactgaaactctgcctaaagaaaaaaaaagaaaggcagctaggaatagtaaaaagaatattggttttagaactcatactgccacatcttgattcctgcacaatctcttattagttgtgatttttaacatctttgtggttgttttcacatttttaaagtgaagagatagcacgttcattgtagagatttggggattagcaataacacagtcaggtctctagcacatactatgtattcaatgattggtggctaatatttttccttcacaaaatttgggcctactccactggactcctcagggaagaaggagaaagggccaacccctgaagaagcaatacagaaactgaaggagacagagaagatactgatcaagaaacaggaatttttggagcagaagattcaacaggagctacaaacagccaagaagtatgggaccaagaataagagaggtaatgagggaaacaagcctatggggagggcccagatgggaagcaggtgcttctgactcttgatgttcagggtatgggctgggtcagctgccctacaggctttgcggaggaagaaaagattcgaacagcagctggcacaaactgacgggacattatccaccctggagtttcagcgtgaggccattgagaatgccactaccaatgcagaagtccttcgtaccatggagcttgctgcccaaagcatgaagaaggcctaccaggacatgtgggtacggggggaggggtggaggggacccaggcactgggaagagtggcttgctatcacactttaaactttaaagcctctcagaatgtgaatttgcagtatagatacttgtgatggctagacatccatctgccccttgcttcctataaaattctttcgctgcctggggcattctagggaggaaagatgccttctctaattctttttttgttttgttttgttttgttttttgagatggagtcttgctctgtcgcccaggctggagtgcagtggcacaatctcggctcactgcaacctccgcctcctgggttcaagtgattctcctgcctcagcctcctgagtagctgggattacaggtgtgcactactgtgcccagctcatttttgtatttttagtagagatggagttttgccattttggccaggctggtcttgaactcctgacctcaggtgatccacctgccttggcctcccaaagtgctgggatcacaacttgcatctttgcaattttccagggatctcttctgattgatagttatgggcttatcagtgtgaccctgcaaggcaggaggggtttcattcatgtgagatgagaaagtcaagggggcattgttgcgtgatttcttagctatctatctcattctcagggacattgacaaggtagatgaactgatgactgacatcacggaacaacaggaggtggcccagcagatctcagatgccatttctcggcctatgggctttagagatgatgtggatgaggtgattgggggtgaagggtcagggaatattgcagaaagtatgggactggccagaaggaacacccaagagaggctcttgggacaagtttgggagggaacttcaaaagtggtatgtttttggaggtagaagtttttttcttcatctaaagtggtcttgtcttccctatccaggatgaactgctggaggagctagaggagctggagcaggaggaattggcccaggagttgttaaatgtgggcgacaaggaagaagaaccctcagtcaaattgcctagtgtaccttctactcatctgccggcagggccaggtatgcagggttgttctgttgtcttgaggacttaagagggtgggagagatatggggaaagattattcctcatccatcctgcctcaaaggagccacacagaaagggctgctgctgcagttgtgcaggttgttgactgcatataggcacccacctagcctgtgcttcactcaacaagccgtgtaccctggtttagggctgcaaatggcaggagcaagaggcaccatttttctaatttgcacaaaggtgctgtgggattgaacagcagcctagcaagcagaaggaccatacctttaggttttttgctggggagacagaattcagcaggctctgaatgtcatagcaggggatggttggagttgctgagaccttactgcttctcctttcttttctctgggtatctttgtcctcaaagctcccaaagtggatgaagatgaagaagcactaaagcagttggctgagtgggtatcctgataaatctgggcttgtcttcctaatgctacctttgttggtcctttcttccttaagtgccaagtgctgagctaaaggaggataactttttggggaagtcatgctgagggtggtagtgtgaccctgcctgaaaaaagggtctcttaccctcccagccctggctcaactctgaagaaggatcttgctacagaaggagcccttgggctcccttctctttgatagcagttataatgcccttgttcccaataaaactgggcagatggaatcctagtgtctatactgccttgtctacccctgaagctgttcccctggcccttggagccttatttcaagcaatgaataattagagcaaagaaggggggttggaacatagaacaaatgggcattcctagtatctcaacctatgttccaggcaaacattatttcatctttcaagccggtttgtcctagagttgcctagttgctgaggctgaagaaactgccatctaccacttagaaccacgtggaggcatctctgagtcttccctcattgctttcccctggtcgtgcctctgccaagacagccccaaatttcttttacaaagcccattttcaaggacaaggagggagaataccatggaaggagcaagtagctttgctacttggaatggaaggagcaagtagctttgctacttggaatggaaggagcaagtagctttgctacttggaatggaaggagcaagtagctttgctacttggaatggaaggagcaagtagctttgctacttggaatggaaggagcaagtagctttgctacttggaatggaaggagcaagtagctttcctttatccagaacccatagttagtagctttcactactagaaggcttggtttgaattctgtgtctgggaacaattgtgtgagaagccttgtctccctgctattgtgtcagtagtggttaaggtgacactggaagagggaaaaggaaccaaggtacttcatacacccgaatacccatttcttttcttttctttttttttttttttgagacagagtctcactttgtcgcccaggctggagtgcagtggcgcgatctcggctcactgcaacccctgcatcccgggttcaagtgattctcctgcctcagccaggtgccactatgcccggctaatttttgtatttttcatagagacagggttttgccatgttggccagtctggtctcgaactcttgacctcaagtgatctgcccgcctcggccccccaaagtgttgggattacaggcgtgagccaccgcacccagctcgaatacccatttctaaaagaactaacagtgccattactttggactatagacaggcagagccataatcaaagtggaagaaccagggcttttaccccactacttgagcatttaaacagcacaaagatgtaaaataatgagcatatgttgagttgaataataaagcttcccaaaatagagcgttaatctgagcaccccatcccctaagagccacatcatgaattacactattgatttaacacagtgtcaagattattggttacaggctctgggcagaaatctatctcttactccagcagtgttccctgctataagattgccttgagaaaagaatgtctttgaccctagttgatgaaactaaatcagacttagatttatttttggtaaaaaagatttttagcccaagacctcctgctttgctcctctcttagccccctccctcagccattttcaggtcgtaatttgcaaggattggtgctgtttagtggtgttgtggagctggcacatggcctcaagcagcctgatctcatgggtgggttgctcaggctggaacttgagcacccaggaatccttgatgatgtccagaatggtggcacgcttagtggcttggcgtagcatctggaggatcaggttctagagcaggggagagagaggtcttgcctgagtttttctccattgtgccacacaggcaatgagcagttggacctaagaaagaagcaggatagcccatcataccactctggtcaaagtgggtgtggctctgattttatcttggagacccaggcagttaactccctggaggggaagggaagagttccttgggaggaatgctttccatatttcccttctggcctaaagagaaagaagctggaacctgtgtatcaggcaaggtttggagcctagtggttggccctttatgccttccatactgtttattataggacaggagctagtgtgtgagatggctctggtgtgggaagagcctttccccagggttgggaggcctaggttgggtgacctaggttggatattcacccctccctgtgggtcatccctgaaggctcagccctccttaggtagccagtaccttgcactcctgggagatggtatggttagctgggaaagtgacctccttctgagtctctcttagcagctttttgagattggtgtcatcaaagggcagatgggcgaccactagagtgtaaaggatgacgcccatgctccaggtgtcagacaggaaagggttgtagggcaagcctcgtaagatctctgggcaagcgtaagcaaagctgccacagtaagtctggctgaggtgggaaaagcagttcacttggcggtaagaagggctacaacccacaggctggttagaaggcaccatcttggcaaagccaaagtctgatatcttcacattctcccacttgtccagcaacaggttctccaactttaagtccctaccagcagcagaaaggctgggcatcaggctggggagagggcttagttttagactgggagctgaagggccaggggtcagagggtaaagatgaggacagaggaagtgggaggtagaaaccattatgagggcacaaggtagagaggaaggaaagccatggagttgtgagcagagcccaaagtagggagagagacagaggatggtatctgaggaccaccgggagctcaccattgtatttcat

SEQ ID NO: 97437 - DNA, 15373 bp, Homo sapiens
catcaccagttgtaggggcagcaggccgggcccccacaggaggaagagggagttctgatgagagtcctgggaggggtcctgcattgaccattccctccctttgctgtttttatttcagggagatctgggcctccctggcctgcccggtgctcctggtgttgttgggttcccgggtcagacaggccctcgaggagagatgggtcagccaggccctagtggagagcgggtgaggggctgggaacagcatgtaggggcatggtgaatccatggtgggtgaggagggggccctgccttgggggttcccagtcttgagggggcagagggtaggagggttcccaagtcactctctgcctctcttgccccatttttctggtagggtctggcaggccccccagggagagaaggaatcccaggacccctggggccacctggaccaccggggtcagtggtgagtagaggtgccctaaagccccacgtatttgatttcctgtcctcgtgaggacttaggatggggcgggccacactgtggggtgttgggggaggcgctttgagagccacaggaccctcacctcactctgacctacagggaccacctggggcctctggactcaaaggagacaaggtaggtgggacaagtgctgctgactctctcttgtgccctggtcacccccttcagcctccactgacctcccatgaccctgcgtcccccactgattcccctcactgatccccggtgtcctgttggtctccagggagaccctggagtagggctgcctgggccccgaggcgagcgtggggagccaggcatccgggtacgtatgtcttactccacagccgaactcccttcatcccagctcttgcctctgatttccaacctctgagtcaatgaacctaatgtcaccatccagggtgaagatggccgccccggccaggagggaccccgaggactcacggtgggtcccgctggggaaagtgacagtgctgtgacttcagtcccctgcctgtgccctttgtaccccaggactctctgccatcctccctagccctctggccctcctcgtctacccctgtcccctttgtctggtccccactgtttccctcctccccctgatcctcctccgtcctccactgccctggttcctgtagctcacggtcaccttctctcacacaggggccccctggcagcaggggagagcgtggggagaaggtaggaacgtggggaaggtcctggcatgagtgggggggtgagtggatcttgtatgatattagaattcaggcgcggggcctccccagtttgggcgggactcacactcttttgcccaatagggtgatgttgggagtgcaggactaaagggtgacaaggtgagtgtgggcatggggagggcagggcaggggccagggtgctcccgactcctctgattcctgcctgccccctcagggagactcagctgtgatcctggggcctccaggcccacggggtgccaagggggacatggtgagtgggcccacgtgtggactgggtctcccctgggtgcgagagggaccccgtggggctggcccagggcatctgagagctcaaactcccagagggtgagggaccttcagccccttaccgtgacttcttacccaaaccaacccagggtgaacgagggcctcggggcttggatggtgacaaaggacctcggggagacaatggggaccctggtgacaaggtacagggaagagggtggtgtactctctgtggggtcctgtggctgtggtggttccacagcatctgtgagggcaggaggggaggacaggaggaggctttctggggttcagggggaaggggttctgtggctgactatggagtggccgagaggaggggctctagggagggctcaaggccttggtgtgaggttaggagagctctgtggactggccctatgaaggggccctatagggacaggaaaggggctccttgggtgtccccatctgaaggtgcttcagatgggatgaggaacccagtgataagagggcggggcaagggtctggagtccttggggtgagaaatgagccagtctgtggactacagcccccagttccacccgctatggcacaggctgggaggacgtgctgctagggccgttcgggagtgacttgagctctgccccagctggcgggctcgttgtattctaagcccccagcctgatctggtcctgactgaatccctctcctggtcactcccacagggcagcaagggagagcctggtgacaagggctcagccgggttgccaggactgcgtggactcctgggaccccaggcaagttctgccccaggcccaggcccaggcccaggtccagagccagcatcacacacacacatatcctgggggtcctcttaagtgctgggggttctggctcccttgctgccggccccatgtgtgttcacccgggatctgtgtgtggcctgggccctggccgctgagcatctgagtggccacacatgcagcggatgggccagtgttggggacagtcccactgaagggctcccccatctgtgtttctcacagggtcaacctggtgcagcagggatccctggtgacccggtaagatgcccctgctcccacaggggccccctgtccccagagggcccccgtcaccatggtggtcccaccagtgtggtagcttttgaccttatagtgacccagtgctctcatggtgtcctcatgtcacccagggtcccccacctccacagtagccgcctatgatggtgtcccctgcctatggtgacccttgtccccatggcaagccccagtggctctggcctccagaggtgactcccaccccatggtgttccctacccactatccagggcgattctctttggtccctcactgacctcctctgacctcacatggaccctctccctgctagggatccccaggaaaggatggagtgcctggtatccgaggagaaaaaggagatgttggcttcatgggtccccggggcctcaaggtaggaaagaaacaagattggtttttttctggtcaggaaggcctaatgttgaagggcgagggacctggggtcagatattagggcactgggtcagaggttggagtagctgaggcctgtttggagagttagtttcagggtgaagggggtcacagagtgaggtgtctgggaatcacttcttcatctgcttttctccctcagggtgaacggggagtgaagggagcctgtggccttgatggagagaagggagacaaggtacagaggggatgggggctggggggctacgtggcctggggcctaaggctcaccccactgcctgatgcctgcagggagaagctggtcccccaggccgccccgggctggcaggacacaaaggagagatggtgagtgtgggcacgctcagaatgagggggccacgggtggacgggggccaagttcatgtctttttttctccagggggagcctggtgtgccgggccagtcgggggcccctggcaaggagggcctgatcggtcccaaggtacagggtctgtggacagtggacatgacagggagtcaggatggggcagggaagctcatggtcgggtcatgggggtgtagggacaaggaaggctgtagagggttgggactttgggggctgaagtggggctggtctcgaggtgtcaaggtgggttggggtcacagtggagttaggatgaaagcatgggaggtggagggggcatgtgcatcagggcagggggctatagtggagttggagtcatggggatcacatctggttggctcacaggtgcttgggttacagaaggtttgggcattaggccagggagctcatgggagttcagggaggttccagagctgagggaggtcagggcagaaggtctctcatgcttcttctgttcccagggtgaccgaggctttgacgggcagccaggccccaagggtgaccagggcgagaaaggggagcgggtgagttgaagccatggtcatggtgaattgaggggagcgtgcactttgggagagggtccatctctggggcctctgattactgactctgtcctatatctccccagggaaccccaggaattgggggcttcccaggccccagtggaaatgatggctctgctggtcccccagggccacctggcagtgttggtcccagaggccccgaaggacttcagggccagaaggtaaggggccccagctctgactcctgatccctgaaccttccctacccttccaacctcataaccatcttccagcctgcctgccccaacctctgaagctgtggcccccaacctgcctgactctgatccccactgcctctgaccctgctcacttggtccctgtgtctgacagggtgagcgaggtccccccggagagagagtggtgggggctcctggggtccctggagctcctggcgagagaggggagcaggtgagtagggattccaaggcttgggtcagagatcggggtgacttctgttgtccctgaggtcagaggtcacagcctggtcccatctgttgcacataggggcggccagggcctgccggtcctcgaggcgagaagggagaagctgcactgacggtgagtgtgggcctggatgggcctgggagggcctgggtgggcctgggtgggctggggccctacctccctcacccagcaccctgacccctgggccctggctccatgcagtctcaccatagtccctgtattatgtgccctatgtccttcctgtgggccatgggttctttatggtccctgtggtcttctgctcccaggaggatgacatccggggctttgtgcgccaagagatgagtcagcactgtggtgagtggtgcccagcccgcagtctcccactccaccccagcaccctaggcaagggcaggcaggcccctagaacttacagggcaagcagtcaagaagatggggggatggatggatacacagaaggacacatgtgctgcaggactgacacatgacatgtgtccccagtggagggagacacacaggcagatgaggattgccatgcagtgctctcagatgtccagcttggctgtgtggggagtgggatgatggtgggagcagagctggtccccttgggcctgacctggacccggtgggaggggcatcagagtgaagctgtctcttcccgtctctgtctgcaccacctgcctgtttctgtgtctggcctgcttctgtctcttgccttttgttggcctgttcccaacttccctctcctctgccttcttctctttttccatctctctatctacctcccaccctctctcttcctctctctcctgtctgttaccctctcctgctatctctttgtgtatctctacccctctgcctgtgtgtctctgtctgtctctccatcttcccatccttctctctgtcattgtctctctatccctctctgccccctctagcctgccagggccagttcatcgcatctggatcacgtgagtagttttctactcccagaactttcttcaccccaggccctgccctgcctatcaactggggtcctctcaggggggttggctgggatggctgcccatggtgacttcagggccctgaggcccctgctcttggctccaggacccctccctagttatgctgcagacactgccggctcccagctccatgctgtgcctgtgctccgcgtctctcatgcagaggaggaaggtgaggacagctgaacccgtggggcagctatgggtggggccgagacacgcacatgggtgtccatgaatgcagggcacacgccaagcacgtagggtctgcatgcagggcacacgcatgggcactgtgtgcacacagtggaaatcagtgctgcccaccttgccccggggccagcagccactgctcccagcacaccctgccctacctgcagagcgggtaccccctgaggatgatgagtactctgaatactccgagtattctgtggaggagtaccaggaccctgaagctccttgggatagtgatggtgagaatggggggctgcgcccagcggggtctggggaggggcaggcagggctgagccctgctgacctccccctgacctttcaaccctctctgattcccacaaaccctgctgacttgaccccattggcccagacccctgttccctgccactggatgagggctcctgcactgcctacaccctgcgctggtaccatcgggctgtgacaggcagcacagaggcctgtcacccttttgtctatggtggctgtggagggaatgccaaccgttttgggacccgtgaggcctgcgagcgccgctgcccaccccgggtggtccagagccaggggacaggtatgggctgagcccccaccgtggggaactgggcactgagcctgcctggatcgggttctgggggaggagtccttgggccagggttccaggtcagggtcctggaggagacgctccctcgcagtaggggacctggggcagacgcccagaccaaagagctgaatatagagccccagccgtggagcccccagtagggtccccttccatgttccctcctttaaagacctaagtatggacccctctgaggtcagagcccccacttcctgttgtagcctccgctccctccccttggcggtgcctctgcctgagcgtctccggggaaggtcagatggctgacgaccgtttccaacctgtcctcaccaggtactgcccaggactgaggcccagataatgagctgagattcagcatcccctggaggagtcggggtctcagcagaaccccactgtccctccccttggtgctagaggcttgtgtgcacgtgagcgtgcgwgtgcacgtccgttatttcagtgacttggtcccgtgggtctagccttcccccctgtggacaaacccccattgtggctcctgccaccctggcagatgactcactgtsggggggtggctgtgggcagtgagcggatgtgactggcgtctgacccgccccttgacccaagcctgtgatgacatggtgctgattctggggggcattaaagctgctgttttaaaaggctcctgttgtgactgtttgggaagatggggggtttcaagggggaaggttttccttggggggttggtattattctgcatgggtacagagtccctctgcccagtcctggtcactgtcttgtgattctcagtccccaacttgtccccggaaaagagtagatagggtgggggctaaggacaccccygggagggatgagtcataggtggggggctgcctcatgccaggaagcatgtaccagctcccaccccagggggctgagggagataaatgggccctgaagcggggtagagggtcagaccacaggacagtagtgcctggccccagccccaggcagccacagcaggctgccttaccccagaagcagctggtggcggtaggactgggttgggtcgggatgggaagggtcttggaggttgagtggatgtggggtttggctttatggagggcttggacccaggggactctgggatctctggctgcttttctgcctctgagatccgattcctgcccttctgtttcctggatcagctgcaagctctcctgctgagaaccgcctgccctcctgtggactctgtgtttctgtctgaatctttctttccatcatgctgtctgtctctgggatggtttctgtctgtctttttcttctagtctccattttgctctgcctccatctccttcatctccctctcttgctgtccctctgtctctggatttctttgtttctttttttctgtcttgctttctgcctctttgtctcattctggctctcctcttgtctccccttctctgtctctggcctggcctggcctctctaacccctttctcggtgtcttcctctctctccatcccccgctctgtcactctgcccttgccatctgtctctgtccatggaccccagttgaccagagcccctgccctgagcccattttctccttgcagcctgacctcacgatgaccaggtgtgctctgctgttgctgatggtcctgatgttgggcagagtcctggttgtcccagtgacccctatcccaaccttccagctccgccctcagaattctccccagaccactccccgacctgcggcctcagagagcccctcagctgctcccacatggccgtgggctgcccagagccactgcagccccacccgccaccctggctcgcgcattgtcctatcgctggatgtccccatcggcctcttgcagatcttactggagcwagcccgggccagggctgccagggagcaggccaccaccaacgcccgcatcctggcccgtgtcggccactgctgagcctgagagagggggtcacagtgatagggccaccctggatgggaagacctggagggcagccacacagctggayggatgctgccacatctgggcatacagtgtctggacgctgccacatctgggcatacagtgtctggacactgccacatggagccactgtcatgcaggtcatatcagatctgagtgccccacagagtcacagtgtgtctggacagcctggacattggacattgctaagttgggtcactgccacatggagtcttgccatgcctgtktgccccacagacctaatatatgtccggacagcttggatgctgccacgtaaggtcactgctgtggcgagtcttgctatgtctgggtgccccatagtcacagaayacctggacaccgccacatgcagtcatcatcatgttactttcaggagcctcaacacgagagctcaacactgcctccgaccagtccctctgaggcccacaggtctgtcatcccataggccaccacacagagaaatgctggctgagggtcacttgcttgctctgtgccccatgaggcagcacctgccccagatggacggggctgtgaggggtgtctccaggcacaaaggcccgaacacaggaagcctgtgaccatggcagccttgtcttatgggcgcatatgtgcgtgtgtggctgagtctctgacagctgtgagtgtgtgtgagcagggtaagggtacgtgaggggtctgagaggagtgggtgcttgtcccccaaacctgcatgaagcaagaacaactcctggccaggccctgtcctccccacgtacccctgcatccccagcctcgacccagggacatgcagggctcacaggagacagggctcaggctgccggagctccaaccaaactctgtcccacttcacgcacggactgtcctgggcaaaggtgttcacctttccgagcctcggtttccttatctgtaaagcaaagcgacaccagcaagcctgtgagcattgtgtatrtagcagacatggaggtcctgcagcaggaggtgctcaataaacacaaagcgactgaaggatgggatgtgcgagaatcccagtggtgtgcacccaggccgcgacacatggtgggtgagtcatacctggcttctctgccttcctccctagctccccggttaactgacctggtcccttggtttggaaggactaggttttgcctgatttcacagcccaactccattgctgggccagagacagaactgactttccaggcagtgtggacgggcttgcccgcagagggggcaggcactctgggctgtgcagacaactctaggtggacatgaaggcagacgctgggtggcatgggcagctctggcgggagagggagactgtactggccacagcgtggccggctgactggagtgggggcactggcgctgccctcacagttgtaagcagccctgtgggggcgggcctacagtgggctggggaggcggggctgcaggagccgcaggagtcgcttctctctcttcagagtgctaggcggggttaccccactctggagctgcagggggcagtggccctggccagtttggttgcaggatggacagaggctcgttaggaggcagctccctgaccgacctggggccggggagcagcaggcggggtaggcacgggacagcgtggggagggtggagggttagggaaagacctggatgaagtcagggtggtgctggaggggtgcgagagtgttggggggtctctcctggtttaggggtgctctgagggccattcatctgtcagtggcccgaaggagggggaaaactgtcgccctgcaagggagagggggctgggccaagggggaactataaatagtgtcttcctccagcccagggggagggaccgccagctggcgctgcccaggccctcctgctctgctctttgctggcctccaagggatcatgtttgtccaggtttcctcttggggtcacaccagtttggggaagtctagaggctcatttaggatgggtttcacatgatgtggctttagcccttaaaccagcacttctagggtgtctgctgtgtgccctgtgccagtcctgagcttctctgaacacctgctgtgtactcagtttggtcatgaacctctctgaaccctttctgtgtgcccttgctggtcctgaatccctaagcacctactgtacgccctgtggcaggctggaaggaggaagtgcagatcagggttcccaggctgcttggtgacatggttctataacctgaagtcagaacttcacactccttgtgagccctgggcccagggagacacaggggacaatcctttgctggaaatggccagaggaagctggaattcctggaaactcctgaacctcccagtggacagcagggctgggggtggagagatatatgtgggaagggaggcagcagagagcagcaggccccactgcagcctgcctgtctctgcacatgctggggtgcaggacttgtgagtgtgtgtgcgtctgtgtgtgcatgtgcagctgtgccagtgtctctgtgtgcatcagtgtgtgggcctgtgtggcatgcactgaaacccctgggtctttatgctgcaaagggtggtttgtgggccagatgtggtggctaatggctataaacccagggctttgggaggttgaggcgggaggatcgcttgaggccaggagttcaaggctgcagtgagccatgattgcactatgtgctccaggctgggtaacaggagcgagactgtgtgtgtgtgtgtgtgtgtgtgtggtgggatggtttggcagttctgtcaggactggccagtagatacagggactgggaagagtttgagctttgagaactggccaccacatggcttctaggctgggacactgggaggaagtccagtggtcagtgcagagggcaccctgggagccaaccagggtcaggccagccaggttcatggtgggcagaggctgagcagaacatgttcacacgtgtgtacagacatcccagcatacttcccacgcctgggacagaacagctggctcactttcggatatactgaggaggaaaaagccatgagggccagagattctaccgggcatccgctgatgctgagagagcagacgctgggacagcatctccatggagaggacacaggggagtgggagcacacatgtgaaggtggactgtgcgattccactgtagtgtggcaggcaaggtctggaaggctgggagttgagctgagtccatgctgcactgtggactcgctttgtgatcttggacccttctccctcttcctgaccctcagtttcccacctgacaaacagggccatgggaggggagatggagaatatcctcagagcagatgtggacggtggccttggggaggaaccccaggcatctcctgatgttgacctgtggccttccagctggacatagggccttgaaggagggtgcctgggtcagccacgggtagactttctggggaagagaggaaggtgcagagctgttgcatttcctgggaaccaggctcatcctgtctgggtgtgaggatgccttcccagagatagccctggccccctgcccaggccagctgtcctctacccccagcccttgattagcatcccaggaggtctgggaagagaatggacaggccagaggaggtgctgggtgtctgtagatatcagaggagatagcttttgcaatgagtgctgcgggttagacagggtgtgggcatgtggtaatgaggtctcagaggccacggtggccccaagatggccttggcagtggccagaagacaagagggctggctgtgtcacgaacagaatgagtggctttggagaagtagggagcaggtcacgaggggcacccagctcatcaggagccgcccatggatgtgctcagatctgctgggactggggtggaggaataagcgggtagatactgcaaaaggaggatgaggaaggaggaagttgttgactctgcctggggcagggtgttcccagggcaagcagctagagctggtttgggggagggtccagatgggcttccagcatgtggacctttggaatcttcagttcctatgaagtgggcaagacatctgtgtcagtcatcttaagggtccttgccaagctttaaagagctgggtggacttggactgatccaaggcagggctgtggcagggagggcatgggagggggtgctacacctatagcccacgaggccagtcttgttgccagtcccatgccctcaacacctggctcctggctgggtacacactgggcagagagaacctgaggatgcagggcacctgccaggggtgttgtggatgacatcgctagagggcagtgtggctcaggttgaagccgtgttggtgggggctggggcagagagtgtacaaagcttggagaggcggggctggggatcccgaggaggcgggaaactgcaggagtccggtgggggccaaacaagaaagtgagccaggggtttaggaacttctggatctctcccttgttccttgtccccagtgcattttcaaagacaagagggagatacaaatatagtaaaaggcaaccataacgtattttaaaatgaatttcttagagattgacatacttaatttatactgtaatactgtaagatagacaatgtgcacatcccattttcctgaagagaaaatgttattaacatattagtttcaaaaaatatgtaaaactttagttaaaaaaaccaaaatactaaaaatcaaaaaaaaattgtaaaaaatgaaattctggaaagacgattaagatactcccagggcttagtgagtacccaaagtacttggttactaagtgccacgcacggccgggcgcggtggctcacgcctgtaatcccagcactttggaaggctgaggagggcgtatcacctgaggtcaggagttcgagaccagcccggccaacgtggtgaaatcccgcctctactaaaaatacaaaaattagcagggcgtggtggtgggcgcctgtaatcccagctacttgggaacccgaggcaggagcatcccttgaacccgggaggcggaggttgcagtgagccaagatagcgccattgcactccagcctgggcaacaggagcgaaactccgtctcaaaaaaaaaaagtcccacgcatttgctcccagcagccaaagcaaagaaagaggaacaatattgaaatgtgttttgagtctctatccatgaggtaaaagagcttttccagcgtggttgagcatgctcctatggacggcggaagagtcccggggctcggagcagtcaagggggaccccgaggaggggcaggagggcgcagcggagttgacggctgggactgcaggcctactggcccctgtcggctctgaccaacctggccgtgcgggtcacgtaggcctcgtcccactgcatgaaaacccctccctcctgggggccctgggctccctagcaaggaggtagcagaattcacgcgtgccgctgctcagggatgcagcgccagggcggagcccgtaggtggggcctatgcaaatcagcgcgggcaggttgggagagctgagtttgcgcatccggggcgggcctgcacaatccgggccttgaactggggcgggaccagtacaatccggagttgagcatgcgcattctcgatcctggcctgaagaactgggcccacttgttccaaaacgggcgggtaggtgagttgggcatgcgtggtcggaggccgggcccctttcagctggggcggagcctactcactctggggcgggacctgcgggaagatagacatgggctgtcgcggcttgaggaggggcggggcccaaggggcgggacctcgggtggcccgaggtggcccggctgctgggttggaagcggcgcagtccgactcatcccggccccgggatggcgtccccacgggaattgacacagaaccccctgaagaagatctggatgccatacagcaatgggcggcccgctctgcacgcttgccagcgcggtggtgaggcggggtcctctgggaggaggtgggaggtgcaccgggatgggtgggtagggcggcctgggcgggggtctcgcatggagaaggggcgggagacagatggggaaccggggacaggtgaggttgccgtgactggggaggctgctggggacaggtgaggcggtcgtgacagtggtgggccagagacaggtgtggcagagcagggggcggggacaggtgtgtgggggcatatcggcttggcggtggctaggtctggccaccatcacctcggggagggctctggccccctcgcttccctctccaatccccatcgcccccagtctggggaggaccctgtgggcaccccaggcccttccctctctcctggccaaggagtgtgggccgggttgttggactggaactgagctgtgtggccctaggtgaattacttggcctctctgagcccagaactttcaaaggtgggctagttttccaacaggaggaagggtgcctcttggccttaaagctgagcttgggcaggaacttcagcagagatgtgctcaggatagagacagaaaagtatgccgtgtgggcctgtgtctgtgtcccgggacatgtaagtatccacctggggtcatgggtgtacagtaaaactggagagtgaaacagctaggagaatgctgaaattcatggaattgttaaggggctcacctctcctagggtcccaggtgtttaaaccgcttccttgagtttctgcctgtccttaaatgagctggcagttttttttttttttaagagatgagtctcgctcagtggcccaagctggagcaagtgcagtggcgcgatcatagttcactgcagccacgaccttctgggctcaagcaatcctcccacctcaacctcccgattagctgggattataggtgcgccaccacacccagcttttttttttcttttttctttttttttgtagagacagggtcttgctatgttgtctgggctggtctccaactcatggcttcaagtggatcctctggcctcggccttccgaagtgttgagattacaggcgtgggtcctggcctgcaacttttttatta

SEQ ID NO: 97438 - DNA, 42309 bp, Homo sapiens
  misc_feature (1)...(42309): n = A,T,C or G
agtcccagctactctggaggctgaggcaggagaatcgcttgaacctgggaggcggaggttgcagtgagacaaaattgcgccattgcactccagcctgggcgacagggcaagactctgtctcagaaaaaaaaaaaaaaaaaaaagagagagatattcacgctagctagatgaccttgggcaagtcccacaaccactctgaacttaaaccttgggcaagtcccacaaccgctctgaacttaaacttcctcatctaaaatggggaaatagtaatatgtgcttcccagagttttaaggatgaaatgagagtgcatatgtgcctggtccaatccctggcatgtcataggcactccgtaccagttggtttccttcctccccgactggctcaagtttcccagcctgataagagcatctcttctccctccaccactgtaggactctttcctgcccaggccctacctctttcccttaccccagccgtgggtaatgagtgctaagcagatgcaggggcaggggacagggaggctgagaggccttcaggcctgggggacctggatccagatgtctgaactctgtccaggaagaacctagattctatatgctgaggctcagcctctgcctcctccccaagggatctcagagttgtcaccgcagagcaaccaggcccagcccctgggagccagccttccctgtgttctgataaacatcgggcatcccagaggggcggtgcctgggctgtttcaggccctggggcctgagcggggctggctcttgttcagcaagcttgagggcaagtccgctcaaggcctcaggcatccctcaattctaggccagtggttcccaaacaagtatctgtcagaactacctgataggccgggcgcggtggctcatgcctgtaatcccagcactttgggaggctaaggtgggtggatcacgaagtcaggagatggagaccattctggctaacacggtgaaaccctgtctctactaagaatacgaaaaaaattagccgggcgtggtggcacacacctatagtctcggctacttgggaggctgaggcaggagaatctcgtgaacccgggaggcggagcttgcagtgagctgagatcgcgccattgcactccagcctggcaacagagtgagactccatctcaaaaaaaaaaaaaaaaaaaaaaaaagaaaaagaaaaaagaactacctgacaacctattaaatgcagatttctgggcctcttaggattgggaatgtctggggcggagcccagaaatgtgccttttcaaaagtttcttagttgattctctagtcgctgaagtgtgaaaagcactgatagagacccttgagcttgtgtgatgggatcagctgagaataataaggctgtcacttcacagatgtgtggcctctttgagcacattttttaacatcttgggaaagctcgcgcgcgcgtgtgtgtgtaggggaggaatagcaatatctgctgccccaaatcctttctggaaagagactggggcattttccatctaggcaaaaataaccctcatcctgcctttttcccagggtggccatgagcagaaagtggctgcgaaagagctttgtaaactggagaggggggtgcaccttgttattactgtggcacctgtgaaacaactcgatgtgttttcaacagatctctcgtctcaatcaggaggtgtctcagcttagccgggagctgcggcacatcatgggcctgctgcaggccaggctgggtcccccaggccacccagcaggctccgcttggaccccagaccctccttgtccacagctgaggccaccatgcctctctccttgtgcgtccagaccaccacccagcctccaggatactacgcttgctgaagttcactgcccagccagtgtggggaccatggagacagggactgcgctcctggacttgagaccttccatattgcccccctacccctcagagcctgaccctctgggaccctctccagtgccagaggcctcacccccaaccccaagcctcttgaggcacagtttccagtccaggtcagacacgttccactgaccctggcccagggcccaggcctgtctggggtgggcgctgccgctcaccactcagggaggacctgggccccttggcttcctgccttggggtcagcagccaccagctggcctggttggctctggatttctggactttttaatgaagcgtggttacctctgacgctattcccttttccaagccttccccaacctccccctctgtgaggggagccacctgagggctgtggaacccagcaggcatgagatgaaccgcagtgcccattgggctgggcagatgagatcctactttctccccaggacctggaggcaggtagagatgggggagcagaggggatgggcaagggacccagctccagcctaggacatgaagggaagaccagacaggatcttagcgtctatagcaagagagacaggttgtaggattttgcctgaagatagcttagtgatattgtgaggtcttctgtctcagcccctgggtctctgctgaagaccttaagagcaatgttacctagagaggggtaggtttgagatgttgcttggaatttgagcaacccatgatttcttaggccgcccaccatgagcccaggctggagaggctcacctcatcccacagcccacacaggaaacaaacggatggctccagatatgtactcttcggctcgcgcagcattattttcaaaatatgagttagttccaatattaaaaatgagacagggccaggtgcggtggctcacgcctgtaatcctagcactttgggaggccaaggcaggcggatcacctgaggtcaggagttcgagaccagcctgaccaacatgcagaaacctcatctctactaaaaatacaaaattagccgggcatggtggcacatgcctgtaatcgcagctactcgggaggctgaggcaggagaatcgcttgaacctgggaggcggaggttgcagtgagccaagatcgcaccactggccattgctctcaagtctgggcaataagagtgaaactccacctcaaaaataaataaataaataaataaaaattagccaggtgtagtggtgagtgcctgtggttccagctactccagaagctgaggtggaaggatgacttgaatccaggagttcaagaccagcctgggcaacatagcaagacaccccccccacccatctctatacaaattaaaaaattagccaggtgtagtggtgtgtgcctgtggtcccagctactctggaagctgaggtgggaggatctcttgagcccaggaggttgaggctgcagtgagcagtgatcacaccactgcactccagcctgggtgacagagtgagaccctgctcaaacaaaacaaaacaaaaaaaacctcaggacatcaggctaccgtgggccaacattccatctggcaataactggcaatcagctgggctgggtggccactgtcctctttagatgggatctgctctgcactctacttcgcagtcaccacgtttcttgatcatctcccgacacccagctagcttcccttgtttgaaatttttgtttggtctctgtgggtatttgagttctcaaaacttgagtgtccatcagaactacctgagatcctattaaaacgcagattctgccaggcgcggaggctcaaaaaaataaaaaaataaaaagcagattcctgggcctcatccaatttggaatgtccggggtggagcccaggggttgagtttgcaacctctgccttacctaacagtgtgttcccaggtccctgtgcccaacaggtgctttttgggcccagtaatgtctgcttctactcctaggcgtgggtctgtcaacatctctgtttctgtctctctgcaggctgtctctcaaggtggtctcttctgctgctagcaactcaaaaatcccaacagcactccctatcctttccctgaccccagaccgctgccaagcctgttctcccccattacaacatggtctcactcagggcctggactgctccaaaactcgcccaggtctccagctctcctctaccacccaacaccctgggctcacttttggataggaaataaactctttatttttgtagttattggctctgggtgtttctgggggttactctgagagccccagggctttggaggagccaacacagcaatcactccccaccctcaccttcgttgtaccccagggcccagttgctatctctaggaagggcagaggcaccagccaatctacttggcaccacattcacaccaccaggggccccagggttgaggaagaaacttaattagtcactatgggcctattatacccccttctctcccctgcaccccagtcacagccatgtatgcacacagtatgtgggaaggacagagtcctggctttggcccacctccagccttggaaaggtgggcctaggggactacccatccctcctgtataaggaactgttccagaactgggtatggcaagggggctgggggaagagcttgtcaccagccagaacctgctaggaatcccactctgccccatcccctctgtcctcccaacaagccctctcttccctcttccttttcacttctcatgaacactggcgcggaagtggggattgtgtgttatgggtgtaagaaagagagacgccctgatgaccagatggaactagatgtgggcacagttttgtggcaggttgtccaagacaggtaaattctccagctgaggctccaggatatgcctggtgttggcgttataggcacaatggccacagctgtctccggtgagctttgattccacacaggttttcagtagtgtcccttgaggatgagatgcaaaagaagaggaggtactggtttgtgttgagaggtaagggtgggaggaatcaggagcgggcccagtccatattgagaggagcagaaaaaacaaatattcctgatccatagagggggagagtgcagagtgggggtggttctagtctttatttacggatggagagggccgaggcagaggttgtccagctctgtattccgcgtcagagagaagagctgaccctggctaggagcaggggaaggcagaggcagagatggtctttgtgccggcccccgcacacaccaagtaggaggtggtggcagaagctctccctttgatctcacccagcatcctgcagagaactcttcctgcagcgctttcctcaccttcccaatcacagacgcccctggcaatcgggcggacagtgcagacaagggcttctccagatcagcgagttcacaggactgaggcctcgcgtgcatattcattcgcaccacgttttttctttcccaattctgcacacacaatcctctgccttcttccaacgctccaccacccgccttccctcggggcgtccggaaccggcggtgacgcggatggcagggttagccttaaaaagttcccggccgtaggctgggcgcggtggctcaggcctgtaatctcagcactttgagaggccgaagagggcggatcacctgaggtcaggagttcgagaccagcctggccaacatggcgaaacccccgtctctactaaaaaatacaaaaattagtcgggcgtggtggtgcgtgcctataatccagctcctcgggaggctgaggcaggagaatcgcttgaacccgggaggcagaggttgcagtgagatcgcaccactgcactccagcctgggcgacagagtaagactccgtctcaaaaaaaaaaaaaaagttccggccgggctccgcctcgcagtcagccggctccaccctaagcccaagtcccaggcagccactgactcctcccagcgctgcgaactacaagtcccgcgatccctcgcgcgctccctaccgccactcccgcgttcctaccggcgccgctgggtaggtcggccaagagtgcctcccattggtctccgcactgtcaatcacctgggagtattgaggggcggggcggaggtggagatccggatccggagcggctgaaaggcggaagtggaggccggagcctgggacaccgccggcggggagagaagcggatcccgtccgagccccggccccaagtaacgccgccgccccggagccgccgtgagtatgcttgtcccaggacctggtgtctcgcctgcgttgaagcatctccagggcagcccttcctcccgcccagccccagtttagggggatactgacccctcccccgacccgtagccccctcttgaggggctccccaggcgtcgggccataggaggtggggagcttctttccttagcttacctgcctttggtgagccttaaggaaaccgctatgactgtcctctggcctgtccattctagttgtgggagagaggtaccctaagttccgctccccctgcttccagaatcggaggatctttgctaggtgtgaaggaacctgtccctcttctcttttagaagtgacagggagtgctgtctgtcgccgttttccttcctcctgtcccacaaaaccagttgtcccctctagccctagaggaatatctcgatttcctttgggggaggggggtcgtctgggtgagaccgttccacacgcacagaagtgtgtgtgcgctcccgcaactccttacttcctctctttcctcaagccagagaaccaaccaggacctcagctgagtttaaagtcacttactagaaatgagctgttttcctgttttgccccttctgtctcccagccctgtcctctagttatgttgttctttgagtgtctctctctttctgcctctgaagaatttagctgaggtttgctcaatcctagctacagatcacagatcagggtggatgtgcccattcattatcttctttcccctccccccttgctccaggctcagctctgtcctcccagagcacgtgagtggtttcccagccgcctcaaagggactgcttttcttgggactkctgtccgtgtgtctatagggaggagaataagacccaaaatgaggagtctggaattgaagggccatctctttcccactcccaaacacacacacatacacctccctgagcaacaggtccacaccacgccagggtctgtctgcaatcccttcagggcttggacttattactgaggactaagtcaagatcacaatggcagttctggatttttaattgtagcctgaggaattccgatacatgccagaaagtgcaggttccctcaaccatattgactgatccttgtctgttgcttggggcttaggtgtgtgaaatagctgctgtctcagaccaagctttgttatgtggccaaagtacaggccggagactgtaccttaacgaggagtagcctggctctgaggccatgactgacccttgctatctacagtggaggaagggacggaaagccgtgcagtttgtgggaacttctgtagctcttcagtgttctgggctacctttaccaccctcgcttgccacttaaaagtgctgtgttttttggccttgaggtgtgtttgagggcttctggacagtggctagtatctgattcctacagtcttttgagtagagctaggatgtactttcttcacttttttgtttgtttgtttttgagatggagtcttgctctgtcgcccaggctggagtgcagtggcgtgatcttggctcactgcaacctcygcctcctgggttcaagcagttctcttgcctcagcctcctgagtagctgggattaacaggcgcctgccaccacacccrgctaatttttgtatttttagtaragatggggtttcgccatgttggccgggctggtctcgaactcctgacttcaggtgatccacccgcctcagcctcccaaagtgctgagattacaggtgtgaaccaccgtgcccggcctacttatttcactttttatcggacaacagaagaagccttccttattagggtcaacagctggatcacaggctctgtatctgtgtgggttcctttggggttcattggagacttcttcaaccaacctagtttctctgatctggtcagcctgggcatctgaggggcagggccagagaggcctgactgctcactggccattggtctctgaccagacttaggtcttcaggagtagaccgcagtttgtcactcttcaggagtgctgggatgaggccgaccagccttctgaggagaccttcttttctttgtctggacatgctctcccagctctgactctgaaacgactttttttttttttttggagacagagccttgttttgtcacccaggctggagtgcagtggcacaatcttggctcactgcagcctctgcctcccgagatcaagggattctcctgcctcagcctcctgagtagctgagattacagccatgcaccaccacgcccagctaatttttgtatttttagtagagatggggtctcaccatgttggccaggctggtctcgaactcctgacctcagatgatccacccacctcagcctcccaaagtgctaggattacaggcatgagccactgcacccaacctgaaacgactttgaaggggaagctctgccatttagagagacgaggcaggccccagtgctttgggtcgttatgcagccacttctggcacctagaaattatagagtccaagcagaggtctgactctgcctggcagagagagcgatggctccgtgtgcgacagaacccctcctttctgatgctgttcctcccctgccctcttgcctctcacaattagagggctgttaaactgtagagggacagtaacactaatttttaaaaatcattttaaggttgcaaaattattttcatacatattcctcataggtgccttgggaaatagtggggcttgtttccccactttgtttttaatttttattattacttttttttttttgagtaagataaggcaagtgtccctgctttagaagggatgcagaaggaacttaagtagtttgcctaagatcgatcatacatttagaaagtagtagagctggggcttggatttggggtcagatgtgacctgatctaacagtgggcccttcttcggcctggtttgttcgttaaatgaatgaacatgcagactgagtgcgccacggcacaagggcagactcttaactctttagccctcctcatcactagcgctcctctgtttttttgtcttccccagcgtctacccgacctcctgtcttctctcttgacccctttcacctctgcctctgaggaccaaaacagttaggagtcccaagtcagtactcttcagggcctgagagtttgctgacatctacatgtcattaatttttctgggaacctgaaagtcctaatggctagaaaatgaaagttaaagtgagtaaactcaggggtcccactgggcagggttaagggggaagcaacagagcgggcctctggttagtcctctgtttctcctgtggtgctgcctgctgcttgcaagtgggaagaatgtggcttgccaccaggagctcctgtcactagaatttacatggaaacagagcaagatcatacatttaaattcagccccaccaagcaagtacttcttagaccttctacttctttttttttttttgagtcggagtctcgctctgtcgcctaggctggagtgcagtggtgcgatcttggctcactgcaagctccgcctcccgggttcatgccattctcctacctcagcctccagagtagttgggactacaggtgcccaccaccacgtccggctaattgttttgtatttttagtagagatggggttccgccgtgttagccaggatggtctcgatctcctgacctcgtgatccgcccaccctggcctcccaaagtgctgggattacaggcgtgagccactgcgcctggccagaccttctacttctaacccttgcccagtaaacaggcagtgtggtcgggtggaaggcactagaacttcagaggcagttggacctgagttctcatcctgattcccccacttaccagttgtgtgaccctgggcttgttacttgacctcactgagcctgtgtttcttctggtaaaatggggatgctaaataccttgcagaattagaaacaaagaaaggagctagtccagtgctggcagactggatgcccacaaaatagcagttgcctctgatgggtaggtaggggtttgaaggttctttttttttttgaggcagtctcattctcattctgttgcccaggctcactgcaacctccgcctcctgtgttcaagcgattctcctgcctcagcctcctgagtagctgggattacaggcacctgccatcatgcccggctaatttttttttttggtatttttgtagagatggggtttgaccatgttggccaggctggtctcaaactcctgacctcaggtgaggtgatctgcccgcctcatcggcctcccagagtgctgggattacaagcatgagccaccgtgtctggctgatttttttttttttttttttttttttttttgagatggagtttcactcttgtctcccaggctggagtgcaatggcgtgatcttggctcactgcaacctctgtctcccgggctcaagctattctcctgcctcagcctcctgagtagctgggattataggcgtgtgccaccatgcccagctaatttttgtacttttagtagagacagggttcctctatgttggccaggctggtctcgatctcctgacctcaggtaattgtgcccagcctcaacactgattctgattcaacatgtgtaccaaatgtatgctggggctgggcacagtggctcatgcctataatcctagcactttgggaggatcgcttgatcccaggagttcaagaccagcttgggggccaggtgtggtggatcacgcctataatcctagcactttggaaggctgaggctgggagatcacctgaagtcaggagttcgagaccagcctggccaacatggtgaaaccccatctctactaaaaataccaaaattagtcaggcgtggtggcacatgcctgtaatcccagctacttgggaggcttaggcaggaacctgggaggcagttcaacctgggaggtggacgttgcagtgagccgagattgcaccactgcactccagcctgggcaacagaccaagagtctatctcaaaaaaaaaaaaaaaaaaaaccagcctgggcaacataatgagaccccatgtctaaaacaaaaacaaaatgtctgctgggatgccttgtacattgcttgatggtttcacaaattgtctcattttgtagacattgaacagaattgatgtgggttgtattcccattttacagaagagaacgctgtgccacttcagttttacttagttgtaagcgttttaatattaaaacagtcctgtaactattatagattagaatgcaaagtttgcatgaattgaagctaacacaggaaactttaattaattaattaatttatttatttttgagacagggcctctctcacccaggctggagtgcagtgggacgatcatggcttacttccgccttgatcttgtggacccaagtgatcctcccacctcagcctcctgagtagctgggactgtaggcatgtaccaccatgcccggctagtttttgtatttttagtagagacagggttttgccatgttgcccaggctggtctcagaactcctgggctcaagtgatcctcctactttggcctcccgaagtgctgggattacaggcatgagccgctgcacctggccaaagacagtattttgcttgtagccagctgctttgggttcaactcccagatttctgggagtttcctctcccctgacttgagtgaagggtacatatgttggggctgtttgagaagcactgctttaggtagaatttataaactaggatgtgccaaaatccaggtaatcatgcttgcaaaaaccttggcagaggagaatcggaatatttttggcatcctctgcattaatagcttggtattgtaagagattacttttccaattaaatagccccatcctctatgtataagaacagtaatacaaataaaagctaaacttctatttttgccatgtgccaggcactcttgtgagccctatgtgttgactcctttaatcctccgacaaccccaggaggtaggttctgtgtttaatccccatgttagagtgggggactatgtagtaatggcagagatggggtgtgctcttatcgctattcaatacagcctctccttgacccatctctgggctaaatgcctactgttcactttgcctagaaggctcttctgcacctcacgtgcctggaaactgtatctccctacttttctctcaaagctcagtttgaatgccacttcctctgtgaagccttcccttgccccaaatgggctgagggcttgtctcctacatgggctgtcttctcaactgctatctcattgttccttatttgcctcattctctggtgggtgagccctttaggggcacagatcgggtcctgtttgatctttgtgtgtttaggacctggcatggcactcagcatagtaggctccctactgaagttgttaaaggagagggcagacattcaaacctgcccttaaagcaaacaccaaacacctgcccacttctttttttttttttttttttttttgagatggagtcttgacctctcacccaggctggagtgcaatggtacgatcttgctcactgtaacctccgcctcctgggttcaagtgattctcctgcttcagcctccctagtacctgggattacaggtgtgtaccaccacgcccatctagttttgtatttttagtagagacggatttcaccatgttggccaggctgatctcaaactcctgacctcatgatctgcctgcctcagcctcccagtgctgggactacaggcatgagccactgtgcccagccttgcccacttctttttttttktttgtttttgagacagagttttgctcttgttgcccaggctagagtgcaatggcacaatctcagctcaccacaacctccgcctcccgagttaaagagattctcctgcctcagcttcccaagtagcagggattacaggcatgtgccaccacggccggctaattttttgtatttttattagagatggggtttctccatgttggtcaggctggtctcgaactcccaacctcaggtgatccaccckcctcggcctcccaaagtgctgggattacaggtgtaagccaccatgcctggccctcgcccacttcttttaacacacacttcccttcctttcttcacacactttggatgtcgtgaacctatgattcaaacttaaatccatctgatcccacagcttgagccatatctttggtccatcccccagaaagttgctcacagacaaatgggagagcaaacaggtcaataggatcaatgttacagtacggatgatgggaagcaagtcacaaactcagtttccagaagttaagactctccaaatctccatttctggtgaagggtttaatgggacaatgagggcgcggccctgactagccacagtccggctgactggcttctgccgtgtgtgtatctgatggcaggacagaacgaccgtgcttctgcagttgtgtgtggtgaggcagcaccgaccccagaccagtacttagcaaggatcagtggaagcaaatttgactctgcctgtggatactgttctgtatgtctgcacaaggctcgttcctgagtgaaggtggcttaaaaaagtggtggcagcagctgttcagaccagtggtatgagcagccctcacatgtgtattccacagatggggtctttaacattccctgcgtcctgtgcctgcagtacttggatatcctctgctcaccttgaggctggtctttctttctttctctctctctctctctctctctccctctctctctttcctccctccctggtttcctcctttccctctggctttccctctttcctgccctccctccctccctcctccccgccctcccaccttcacctgcctcccctcctgcccttcccgccacatcccccggccttccgctcccccactccctccacgactcggccctctgcacccaagctgggagtccacctcgtcagatctcggcaccaaggaaacgcccgcgccccnnnnnnnnnnnnnnnnnnnnctctgctcaccttgaggctggtctttctttctttctctctctctctctctctctctctctttctttctttctttctttctgtttctttctttctttctgtctttccttctttctttctttctttctttctttttctttctttctttctttttctgtctttctttctgtctttctgtctttctttctgtctttctttctttctttcttgacgaagtcttgccttgtcgcccaggctggagtgcagtggtacgatctcggctcactgcaagctcccgggttcatgccattctcctgcctcagcctctcgagtagctgggactacaggctcctgccaccacgcttggctaattttttgtacttttagtagaggcagagtttcaccatgttaaccaggatggtctccatctcctgacctcgtgatccgcctaccttggcctccttttttttttttcttttgaaatggagtcttgctctgtttcccaggctggagtgcagtgatgccatcttggctcactgcaacctccgtctcctgggttcaagtgattctcctgcctcagcctcccgagtagctgggactacaggcgtacgccaccatgcccagctaatttttatatttttagtagagacggggtttcgccatgttggccaggatggtcttgatctcttgactttgtggtctgcctgccttggcctctgaaagtgctgggattacaggtgtgagccactgtgcctgggcaatttttgatttttttgtagagacggggtctccctatgttgccgaggcttaataaacttattctttcagaatacttttagaaaagttacgcagatagtacagagttttctcacaatccctcacacatagttttccctgttattaacatcttatgttagtatgtattttacattaaagtccatcctttattcagatttccttagatttttacctgatgtccttttgctgttccaggatcccatgttacctatattcattgtctctttaggctcctcttgctgtgccagtttctcagacttttattgtttttgatgaccttgacagttttgaggagtgctgggcaagcatctaaagaggatctcggccaggcgcggtgactcacgcctgtaatcccagcactttgggaggccgaggtgggtggatcacttgaagtnnnnnnnnnnnnnnnnnnnnnnnnnnnnnnnnnnnnnnnnnnnnnnnnnnnnnnnnnnnnnnnnnnnnnnnnnnnnnnnnnnnnnnnnnnnnnnnnnnnnnnnnnnnnnnnnnnnnnnnnnnnnnnnnnnnnnnnnnnnnnnnnnnnnnnnnnnnnnnctccagcctgggctggagacagaatgagactccgtctcaaaaaaaataataaaaaataaagagaatctcttctcaactgggatttgtccagtatttttctctttttaacagagtcttgctctgtcagccaggctggagtgcagtggtgcaatctcggctcaagccattctcctcagcctcccaagtagctgggactacagaaatgcaccaccacgcctgsctaatttttgtagagacaaggtttcaccatgatgtccaggctggtctcaaactcctgagctcaagcgatctgctcacctcagcttcccaaagtggtgggattacatgcgtgagctaacacgcctggctgtgtccagtgtttttttcataagtagactgtgccaagttttgggaaggaggaccagagaggtaaagtgctattttcatcacatcatgtcaagggtacatacaatccacaagcctttccatgactgatgtcaaccatgatcacttggctgaggtgatgtgtgtgaggcttctctgtaaagttgttctccccttcccctttccatgctgcatgcaccctttggaagaaagtcactgtgtagcccacacctaaggaacagggacttatgttcatgttccccttgttgagggcggagtagctacatgagttactaaattattttttctttttctgttttttttgagatggagtctcactccatcgcccaggctggagtgcagtggcgcaatctcggctcactgcaagctccgcctcccgggttcacgcctttctcctgcctcagtctcccgagtagctgggactacaggcctataggcgcgcgccaccacacccggctaatttttttgtattttttttagtagagatggggtttcttttttttttttttttttttgagacggagtctggctctgttgcccaggctggatgcagtggggcaatctcggctcactgcaagctccgcctcccaggttcacgccattctcctgcctcagcctcctgcgtagctgggactacaggcgcccgccaccacgcccagctaatttttgtatttttagtagagacagggtttcaccttgttaggcaggatggtctcgatctcctgacctcgtgatccgcccgcctcagcctcccaaagtgctgggattacaggcgtgagccaccacgcccaccctgagatggggtttcaccatgttagccaggatggtctcaagttcctgacctcgtgatccacccgtttcggcctcccaaggtgctggggttacaggcgtgagccaccgcgcccagctgaattattaaattcttctatatgagagacttgtctattttcccccatttatttttatttatttatttattttttggagatgagttttgctcttgttgcccaggctggagtgcagtggtgcgatcttggctcactgcaacctccacctccggggttcaagcgattctcctgcctgagcctcccgagtagctgggattacaggcacatgccaccatgcccggctaatttttgtattattagtagctacggggtttcaccatgttggccaggttggtctcgagctccaggcctcaggtgatccacctgcctcggcctcccaaagtgctgggattacaggcgtgagccactgcgcctggcctattctcccccatttatttgttcaattatttatatcagtatggactccaggatatttattttacactttggtttannnnnnnnnnnnnnnnnnnnataatccagcgataaggccgggcacagtggctcgcgtttgtattcccagcacttggggaagccaagatgggcggatcacctgaggccaagagtttgagaccagcctagccaacatggtgaaaccctatctctactaaaaatacaaaagttagctgggtatgatggtgcacgcttgtaatcctagctactctggtggctgaggcaggagaatggtttgaagcagggaggtggtggttgcagtgagcagagatcctgccactgcaccccagcctgggcaacagagtgagactttgtctcaaaaataaataaataaataatccaatgttactttgttttattgcccaaaatgtttcagctttgcccattggttgctcttttagcctcctttgacctgcctagtcattgtgaggatttttgtttttggtttttggttacttctttacattttggcactgccagatttttggagacagactcactctgtcccccaggctggagtgcagctgcacgatctcagctcactgcagcctctgcctcccagattcatgcaattcttgtgcctcaacctcctgagtagctgggattacaggtgcacgctaccatgcctggctaatttttgtatttttagtagcaacgaggtttcaccatgttggccaggctggttttgaactcctgacctcaagtgatccacttgcctcagccttccaaagtgctagggttayaggcatgagccaccactcccggccccaggcttactttgtgtatttcgtgccagagttgtagattcagctggctctccaaggccactgcctttttagcaaatgttttctctcaggtatgttgacatagagtgatgtggatgccttgagttatttcttctcttgatggttagtcatagttactagagactctggagttgggaaaggtagaggtggacctgggaaatctaccccctgagaatcaactgcagtcctgggagttaatcccagtagctggctgttgttctactcacccattcatactgctcttacccctgcctgatgctatgactgatccaaaaaatggtctgatttggtctttcctttggaatttacctatggaggtgtgggaagatgaggcatgtgtatataatcgttctctatttcaggtgctaagttctccagctaaaccttcctggactctgggtcttgtaagagattccacatggtccgggccagtcagtgtcttttgctgcccttccaaaatggactgcccccatgggacggtttgtggctgttggcgggctcagggtaggctgtcactttgtgccgtgatcctgaatcattgaatagctgaaatccttccattgtactgtcatctctctgaaaatgtgtaacttgagccctgctggaaacactaacttgggatcttaacaggagttggtttacaagccttttgccttctattcatagctccatgtatgtccccttcaggtggctgtcagaggcatcccaggcatggaggagggcgtgggtggcctctctaaccctggctgctctcctagacatcagattgctctctgagctgctcagacagcgtggtgatgaatgacgccagtttccaaacctctagcatttgcagcctggtttttaaaaggaactctgctttctttgtcagctgctctattcctgtcccctagccctctcaacaactgaactgcttcttccctttcctgaaagaggctttgagatggaaggaagggcatttgggctttaagatgctttgtgggctgggcgcggtggctcatgcctgtaatctcagtactttgggaggccaaggcggggggattgcttgagcgcrggagtttgagatcagcctgggcaacatgatgaaaccccatctctaccaaaaaaaaacccaagatgctttgtgttaatggggctttttttttttttttaagaggttatggtttgcatggttggggccttcaccccatgcagatttattggatggtaatggtttctcccctccatttttgtggttttgggagctagtctctggaggatacaagattggggttgttgacaggacactgagtatcttctaggaaactgrggaaagacgtcctcttcagcattctctccaaatgagaggtgctgaagaatggagtcccgggaaactggaggtaagaggaatgtgtgaatgttgtctgacagatgaagtgaggagtccggctccttcacagggaagtgaaggcgcaggggctcccctgctrcagaacatgtactgaatgcttcccgatgccaggccctttgctgagagtctcacatgcatcatcttcctggcagtcctggagacgggtggtactggtctctccattttacgtgtgaggaaatgggttcagtgacaacaccaggccaccctagtaagtggtgcctccagaacttgaactgaagttcaagttgtctgactccagcacttgtgykcttaagctctgtgcagtagggatggaggaagtcctccctggggaagtgaggcagctcctcagctgctctgtggctctgttaggggacccgagccgtctggcagatgaatgcagatttaagccctcaacttcccccgttcacttgccaagtgtaagcgggcggtacctctcacatgcacagttcaccgtatctgtgctcacctactatgggtcaggcttgctgttatgtgctgttaacacaaaggaaacccattgtccagcctttgagaattttgtaatgtggttgttttcatctgcaacagtgcctttaatttctcttgctttctctctcacaaccctcagtcccccaagttctccagccccttgccacctacactagtcttatgaacatttggggccatggaagcagaagtgtgattcgctcattgaatcttgtttagacctattcattgcttgatttcttcactgggcaccactctacagtttgttcagcaaaaattaagaaagatggcagacacagtggctcatgcctgtaatcgcagcactttgggaggctgaagcaggtggatcacttgagcccaggagtctgagatcagcctgggcaacatggtgaaaccccatctctacaaaaaatagaaaaattagctgggcatggtggcatgcgcccgtagtcccagctacttgggaggctgaggtaggaggattgcttgagcccaggaagtcaaggtagcggtaagctatgattgcgtcactgcaatccaacctgggcagcagagcaagaccctgtctcaaaaatgtatatagaaaaaagagctgggtgtggtggctcatgcctgtaatcccaacactttgggaggctgaggcaggcggatcacctgaggttaggagttcgagaccagcctggccaacatggcgaaacctcatctctactaaaaatacaaaaatacaagctgggtatggtggtgcacacctggaatcccagctactcaggaggctgaagcacgagaatcgcttgaacccaggaggtggaggtggtagtgagcccagattgtgccactgcactccagcctgggcgacagagcgagactccatctcaaaaaaaaaaaaaaaaaaaaaartatatatatatatatatatatatatatatatattctaaaatattgttctttggtgcccaggcttctgagaatagccatcgtccctcaggtctcccactgagaactttgacttttttcttgttggttgcatasccgctgaccacggtgtgtgtggtgtctgaacaggaggcatttggattgctatttctcttttctcccactttcctctcaaacttgacctctgctctctgtttaggagctgaaggcaaaacaaaggggcagtgatttaaactggctttcttttgttttctgttatttgtaagggcgggaagggttttggagaggtgtccgctggtgtgagtggctggatgaacaggtgctgcttctgatcctgactttcagcagaggtttctggagtctttctgggcctagggaagcagcagaagtggcagctgtcctggctggtgcttctgacccctgcagagccccttttgagacggggggaagacgggccctacattgatgagattccggtgagaaatgtcctagctaaatagtaactgcctgaacaaatgaaatacaggatagttggggtaggctggggccagaagaacctttgccttggatggcactcttcctagcatcctgcctggcattggcaggtgaagaactgactggtggcgtgtgagccaccatacagccatgttgtcatccctaacaagccctgtggctgggacgtgtgtgtggttctgggctgcagaaagattccaagttgagcttttgcttgaggcttgagagagcagccctagacaggagtagagaatctggcacagcctggatcacaaggtcaggaaatcgagaccatcctgactaacatggtgaaaccccatctctactaaaaaatacaaaaaattagctggatgtggtggcacgcgtatgtagtcctagctactcaggaggctgaggcagaattgcttgaacctgggagctggaggttgcagtgagccgagatcacgccactgcactccaacctgggtgacagagcaagattccgtctcaaaaaaaaagaatctgccacaaccttgctgactgaggtgtgctgttagacactgggccctcttagggagaacagtctcaggaatgtcagcgttagggcctggcccccctggtgccttttggaatcggtaggctggcggagagccttgcctggtgcagctgcaggcagtgccctgtctgtgggccttccgtgctacctgtctcctctgttggccagcagggccaatgactgagagttgttgagctgcccatgaagcctggggcccttctgtggacagcactggccgaccacactggccaagctgtgctagcagatccatggagatgtcctcccaccccaatagtcttcctccctgtgggtgcagaaagagggagtggatgctggaggtttccatccagccctgactgctcctctctgagcctctccagagaacccatctgtcattgagagctgggaagaagctcagggatcagggaaggatttcatggtgttctgctggggtagagtcctggaaagctaagggtctgtccctcaggggtgtcttccacccgagtgagcttggcatctgtcctaagtgatacaagacttcccacacaagggaaagggctgcaggagccagctgtgctctgtcctggctgacttcagcaaagttccaggctcagtctgcatagtgtttattaaagatcacttggtaatgtgtatccaggctttaagcctcttgatgcctctgcacactggccccttttgcaggtattggtggagttggtgtctgcacttggggctctggtggaccccatcagggcctgattgtggtgtggaagtctaggcactaagcctcagaaatcttattgaaaaaagaatgaaatgaaaccaatctcagttaaggaaggtgggggtgctttccctgtggwaggggacccagctcaccttcagtgcccctctgggatratttacttccctttccgctggaaaaagggtcatcttcctgtggctgtggaaaggcagcaccttcctccctactgctgcctcccccaagtctaggtttaagagctggacctcctgaaggtgggaggtggagcccaccctgttgcaacaccccccattgggattcggctagatctcaccctgggctcttaagcttctggcttccagggccagggccaagcttcccctgttagactcttaggtaagacacaggccctgtgtgaagcagttccataggcctggtcacacagaggacacccttctctttgattccatcccccaacccctaaacccccctttcctctgcagatatactctagactggttggggagtggagaatatcatactgttataacctctttctccccatcgaaaagacataaatatcagtttctctttattattgtgaagctttaaaccacttgaaaatcctttagcccacagttaagcccaaacagtaaatatatccttaatatatatgtgggaatcttattttttatgaggaatcccattgtcttgcaccttatttgtgtttaacatttgggtatctttgttctccgttggtcttttccaattcaggtatcatctttttgattgtcttttttttttttgagacagagtctcgctctctcgccaggcyggagtgcagtggcactatctcagctcagtgcaacctctgcctcccgggttcaagcgattctcctgcctcagcctcccgagtagctgggactacaggtatgcgccaccacrcccagctaatttttgtatttttagtagagacggggtttcaccatgttggccgggatggtgtcgatctcttgacctcatgatccacccgcctcagcctcccaaagcgctgggattataggcgtgagccaccgtgcccggcccttgattgtctttaatattattttcttcatactaaagaggcagaaaatattttatatacagaggagctagattgcattcatatcgtttccaagctttaacttttcatgattatatgcaaaattctataccagcagcattttttaacctttttattgacatgtgacttatgtataatagtttacaaattgtaaatacagctcgatgggtttttrtattattatacactcatgtatttacctctcaaatcaagttataactcctccatccagcagtgtgcttttttttttttttcttttttttgagacrgtgtctcgctctgttgtccaggctggagtgcaatggtgcgatcttcgctcaccacaacctctgtctcctgggttcaagtgattctcctgcctcagcctcccaagtagctgggattacaggtgccagccaccacacccagctaatttttgtatttttagtacagtcggggtttcaccaggttggacaggctggtctccaactcctgacctcaggtgatccacccacctcagcctcccaaagtgctgggattacaggcatgagccacctcacccggcggcaatgtgcttttttcagtttgatagaaaytcattttttcctagctaaaagctacattttttaaaaacatgcatagaaggtcgcagtccctgttatttttagtaacaggggttatggtaatgagattgttaatattctggggtttttctttytatctctaataggagagccttgcttgagttatgagtcttgggcaggcttgggctctgccaccagctagctggctgtgtgaccctaggcaggtcacttctcctcaccttcattttttttctttaattgtcaacagtaggatggggtctttaaggcccttttgggctctgactaccaattctagcctctggggtaataaacctgccacttgttgaaagctcaccttcagcctgatactgtggtgcattgtttcacttgatctgaactaccccatgcaattagtattaaagaataccaatttttagataaggaactgaagctgataatgatcacttgtgtgacttggccaaggtcacacggctaataaacggtggagtggagcttgaaccaaacccggctcagcctcccaagtcctaacctgctagccacgctggggaaggttgtgggtacctcgtgtggatcgtggctggcgttgcttcagattcttctttcctctgggtctgcaaccagctagaagcctggatagtcctgctgtgagtctgtcctctgtttctgtgtgctggcagtggttttcccttttgaggaagagctgtgttcttgagcctatgggtaartcatctccccaactaatcggagcctgggaagcatttgcaaaaccttgactccagttggcttttaaatcaaatgtcttccactttagcctttgaaccgagttacttcctcctgtgtctcttgctccattttctttaacaactcctttctgctgttgtttttttggtttgattttgttttgttttgctggactcttgtttaaatattcaggaatgccyttttccggggtaaaatgtagctgaagagtcactggtcagaagcacctgcaggggaccctgggcggggtcacttggttctcaggccacctggctaaccttgagtgagctagtctctacgccccgcctgccctggtcaacagtctgattggtttccctaatcagcttgctctccaggctgtgccaggactctcagctagaggaagtctctaaagcaaacaggaagtacacgagacactcatcagctggaattgctcacccttttaccaggaaggacaaaacatatgaagtgggtgacttcgtggattagaggaaaggtgaaactttcaaagggaggttagggggaggaattgcagcagcatctagtgtcttggagaaggctccagttgctgagtgaagctgaagacccctcccacattcatggacttacacatgcacacttacgagttgtgcacagcactgatcgggggtgcctttctgtctcttggatttctccctccttcgtatatcaactgtagctcttgtgcttcgatcaactgcttaaaatcactgggaacttatttttaaaatactgatttctggactccacctctagagattctaattcagttggtcagggtattttctaaaggccctgggtgattctggtgaagaagagtttgactggaggctgaaatagaaggatcacttgagcctgggaggtcaaggctgcagtgaatcgtgattgcatcactgctctagcctgggcaacagtgagactctatctccaaaaaaaaaaaaaaaaaattacaggtggctcacacctgtaatcccagcacttttggaggttgaggcaggagtttgataccagcctggccagcgtggtaaaaccccgccgctacaaaaaatacacaaaaatttagccgggtgtaatgacgtatacctatagttccagctactcctagaagctgaggcattagaatcscttgagcctgggtggcagaggttgcagtaagcagagatcgtgccactgcactccagcctgggtgagagagcgagattctgtctcaaaaaaaaaaaaaaaaaacttaagaaaaaagaaaaagaatttgagacccactgacctgtagtgtccagagcagagggaaccccggagcagggaagaacagtgtcccatttttctttctctttctcttccatccttggcccagaagtgcctgtgcacagggccagggtgtttaggagcttagatcccttctgcsctttcatgtgcattgtattaataggaaaatagtgtgactccaagtccttatacattctctcccctttcctgtggaagacatgaggttgggactggtgcttgttcttagtggcctctgaacaagccagggttctgatttggatggtgggtccatggcaaggagaatctttctccctagatctgaagctccagcacggccattgtacttgtgaaaaaaagtcaacttttttttgagacagagtcttactcttttgccccaagctggagtgcaatggcgcgatctcagctcactgcaatctctgcttcctgggttcaggcaattcttgtgcctcagcctcccaagtagctgggattacaggcgtgtaccaccacgttggctaatttaaaaaaatcaactttgactgtaactttagctcttatggagaatttgatttttgtctcaaagaagactttgaaaactatgtcagttttggytataattccatcacctgactgcacaagtggataatttttgccaggggttcaaaaagaaagattgccagtaagacacacatccctgggaggcaggacagctcagtgaatgcattcacctttactacctgccatgtcttcagtttcccaggcttgggaggagagggtataatgcttcctggggctctcggtctggccttcccctggcttagacaccctcatatctccgtgcgcccttcctagcaaaattggcttccttgggctttattgactgcaaaggttggacaccactgctcatttgatcaccaagcagggccaggcaaaccactaggcaacagaccgtaaaaagtgctgggtgtgcctgctcaggtatctctggaaggcaggatcagtgaccaggcagaacatgtcaccagctagttcatgccagggagagcctgtctcagttcattgggatggccagagtctgttcaccaayagtcttggagaaagtgttacaaataaccctgtcagtactcttagctactgtttactcaacatgatgtgtgtgagacagctggcaaacactgccattaaccctggtgtgccccatattagtgatgagaacactgaggctcagctcaggtggcttctacaaagtgattcagaagtggcaggagacagtcacatctgtggtgccgaaagccagtgcctgtgctcactctctctctgccagatgctctagccctggctgtgcttcagtgrgtgtgcttcacctgcagatgctgggctctgtgccaaaccttcatgagaatctcgaggggctggctgcacagatgacttcaatgtacagacaccgttgagaaccactgcaggagagttatttgtctccccttctggcttgtttttaaaaatcacattctgttcctctaaccctgtggtttggtagtgacaagacttagatctgttacctgtatttttctcgacctgtaggtgctggttacttcccagctcggtaccctaagcaccagctgctttggtttttttggaatcagagacttggttttctattaccatctcccagtccattcatacctcctcctccagtgccccagccacagaccattgctcagccaagactctgtgtcacgtggattcatggtaataaccaacttgtaattccactgtggttttccctctgttgctgtcgccctgcctggctctgggcggctcctcccactgttgagggcactcagaaactgcaagattactgtgactgttgctagagccagctagagctagaccttcctggaccagcaaagttgctgccacaaaaaaagagagtttcattcacctagcagccctaaaccaaacatagggcaggcactgcctccattgttcttccacagcagggaggatggcatcatgtctatggtgggtctggggggttctgtcacctgtaggctgggtgaccatgagcaggacatttaatatatgaatgttaaattatctatctgaaaaatggaggttgtcgtaaagcttgaaggagataatagttgtgcaattgggaagctgaggcgggagggttgcttgargccaggagttggagaccagcctgggcaacacagtgagactccatctctgcaaaaaaaaaagaaagaaagaaagaaagaaaattttaattagctgggtgtggtggtgtatacctgctggaggctgaggcagtaggatcttggaagctgcagtgagctgtgatcacaccgctgcactctagcctgggcaacacagtgagaccttgtttctttaaaaaaaaaaattatttccttccatcagcactctttgagttcctagtatgcacataggcactgtgaggaaggcatctctaagaagcagaaagcacagaccttgtctcttcattgactgaggtgaaatgagaaagcrtcttaaactatgaaaaattgaaatgacataactttgaaatatttacatggtatttctggttgctaattgagacccaccaccccgtacttccttccttgtacttttggggaagaggtgggccccatttcaaacctcttttcctttggttctctccagaaaggaaactgttgtttctggctagtgaatcattcttcctgaagctcactttttaaatgagttgctgggagaacttggatgtggaaaacratttgaggttgaacaaaacaagccctttgctgtcakcttcttgcatgaatgtggaccatttgcttcccacagatacctcctgttcatccacattgctgtcccttaaccatgagggaatgtacttcccttgctcaggggcagatcggggctctccctgggatcttagactccattatgcaaagggcagcctaataaaaaccttttctttccaacccaggttcaaatgctgaacagtgttcagtacttaatacctactcacaggacctgtttgtaaaacattctgtatatattctgatgtctgttgacatcagatgtatatgtctgatgagacatccacttatgtcttctagaggcttctagagataggctcctcatgtgtctgcaattccaaaacttaacaaaaacaaaaagttgagcctctgaagctgtcactaaccaagtgattcagatgtcgggactggaacaccagctgttggggatgcaggacttggtctctgccctcccacacctcctgcctcttctttctctccatcgccccatctctgccagtagagaatggaactgaggtctctattgaaaaagggaaagttggtagctgtgctgactgtggcagagctatgactttggtgtgtgtttctgtgtgtgtttgtttcggtgtgtgttttgttttggtgtctgttttggtgtgtatttctgtgtgtgtgttggcatgtgtttttgtgtgtgtgtgtgtgtgtttcagtgtgtatttgttccggtgtgtgtgtttctgtgtgtstttgtgtgtgtgtatcggtgtgtgttttactatgtgtttgtttctgtgtgtgttttgttttttaatgggtgcgagactttggcccatcaaaaatgagagaactagggaagaaggatcaggatgagagagtgaaacattgctttgattctggtgcacagaggcacacagtccagccctagactgaaagtcggtcagtccttctgaaggtggcaggagaaaaatggctatgttaataacaacttgtgctggccaggccctggtccctgaatgsccatgaggttggccaagcaccttctctgaggagctttctaccaggacctcttgggcccctgtctgcctcaccactgtggtcctggctaccagactggaacttcattattgatctaaatcctagtgtcttcctgagcttttgttttgttttgttttgttttaattttgccccaaaagcctgttgacttaactgtcaccaggctgtcacacattcattcatcgcctgtgtgtgtttatttgtaggtgaatgtacatatttgggatccagaagtcaatgtgtttgctcagaaccatgagcctgaagttgggagaccattctcctctttacagctcagatggtggtagagccggtagacatctagtatagcccagtggggcctcctgacctctagtggggagggcagggaggtgaggtgaggggaagcagtcagctaggtcttcagtgaggccagagggaaagatctgtaatttaagaaggacacagcgggtgacggcctctgaactaactcagtacttctcatttctcccttacagttggaggtccccctccccactaagtgcctctttgcatagcaccagtccccacccgcacgctctctggaccactacagctggacgggcaatggcgggtcggggaggcgcagcacgacccaatggaccagctgctgggaacaagatctgtcaatttaagctggttctgctgggggagtctgcggtaggcaaatccagcctcgtcctccgctttgtcaagggacagtttcacgagtaccaggagagcacaattggaggtgagtgggcatgagggagtcggggaggggcctgaaggttgccaaagaaatgctttgaccttgaggagatgggaagctgcctgcctgcattagggactaaatgcgtctgtggtggcagccccacttcctcacctgggccctggaattgagcccagcaactggtctccatgccagagtcccctcaagcatcgctagtaagcatttgctgggagtggaaagctagcttcccatcctgtttctgccccttcttgatctgtgtggccttggctgaggccctttcactgccctggcctcatggagggagagctgactctggatctttgaggccccttcttactataatgggtggtccatgtgccctggcctttcccacttccagaagaaggaacagcctggtgagtcggagctgggtgataggtgggtgtttctgaagctgactttaccctttctggagctcacagcctgttgttgattttccagtggtcagcatttaggatgtgagtgagggtctggcctcggcctcttgcctccgtggctaacacacacatcaagaggcaggggccaacgctggccttggccttgagtcatcctttctctactctcttggtaggaggtttctaggcagctggaaacaaaatgggccatgtcagcagtctccctgctgcctcctcagcatttgggtcaggagctggagaggggaagtgaggcagtgccccatgtccctcagtgagctgggggagggcagaccaggaaagcagccttctacacatggctgtcctgggttctctgctgggtccaggggcaaaggggccttttgctgtctgtcccagctctggactcctcctttgaagcatgtgtacaggcaccctgcattcccctaaggagtcacctcttagtgactgaaggtcaggtcacagggtggccatacaggaacaggtctgggtcagagctaggggcggtggctagctggagtgcctggaggtggtaggggtggttgggaagccggccacccagcctcagcctggtggtggaacagtgtgtacttccccagcatagctaagtgtgtgagaatgtccttaggaaacccaaggtcagtgacacccctgggctggagcaaactgaggggtggagcggtccctagctgctggtctgttctctgagtggcggaggaggaggtctgagggcgctcacccttctgtgcttggagtaggcttcccctaggctttccctctcttgcccctgctgtgttgctcttcagagagtggtcctgagatggctcagtgcatgcaggmgtcccttctcctgccgttgcctgggctgggtctgcaaagcctgtgcagaccccgtcccccagacacatacataaaaatccaaactccaccccccactcaggcctgctttggctcctggsttgagggttctctgtgcccatctcagtggtgggcttctgagtgccagagcctagaagcaacagtgggattgtgtggggtggatkccaactcgctcttgcccatggacgctccttctctcttacagcggccttcctcacacagactgtctgcctggatgacacaacagtcaagtttgagatctgggacacagctggacaggagcggtatcacagcctggcccccatgtactatcggggggcccaggctgccatcgtggtctatgacatcaccaacacagtaaagatttccccttgcttcttcctttgcccttcatcttctcaaagtcccagggattgggttatcagagccctgatttcaggccgcttaaccctctgttcctgggtggggggtgggcagatttcctgtttggggacattgcatcagaatctttaggtggcaatgtcttagataatttggctgtgccagcttgagagtctctartgggtggccctgggcagaatgccttctctgtcccttcgacattctgtccctgtctcctcaggatacatttgcacgggccaagaactgggtgaaggagctacagaggcaggccagccccaacatcgtcattgcactcgcgggtaacaaggcagacctggccagcaagagagcygtggaattccaggtggggagatgacagacttgggggaaggagtggagtaagcagctcccccckgcctcgcctgggatgctcaggggctttgggaagggccatgctaggaggcaacagggaagcttccatctgctgtcctctcgtgcctcaggcatgggcctaacatggctcctgtctgtaatcccagtgccttgggaggctggagtgggaggatcacttgaggccaggagttcgagaccagcctaggcgacacagtaagactctgtctctgcaaaagatttaaaaattagctgggcttggtggcacgcacctgtagtctcagctgctcaggaggctgaggcacgaggattgtttgagcccaggagtttaagattgcagtgattgcaayactgcactccagcctgagcaagagtgaggccccatctctttaaaaaaaaaaaaaaaacagccaggtgtggtggcacacacctgtaatcccaatactctgcaggctgaggcgggagatcacttgagcttaggagttcgagaccagcatgggcaatgtggcgaaaccccatgtctaaaaaaatacaaaagttagctgggcatggtggtgtgctactcaggaggcygaggtggggaggatcattagaggccaggagattgaggctgcagtgagcagtgatcgtgccactgcactccagcctgggcaacacagtgagatcctgtctcaaaaaaaaaaaaaagaaaagaataaaaaaagcatgggcctaaaaggaattgcccgtcacctgtctctccctggttctctttctttggtggtaggggtatgtgtatatatggatcactagccttctacttctcttttcttgtaagttgactttttaattaaacttattgagaaagaaatacttaagtctctgctaaccctagaaactcaacttctcttcttctaatttccccagtttcttgtccttccagaaatatgcacgtgttttttaatccctttctttacattgatggcagtgtgctatacatactgtatatgataattttttaccaatccctaataatagcaaaagactgaaaacagtgctgcagtagacatccacatacttttgtgcttttgtgcaaacatgtaagtgtatttgtaggttaactttctagaagtatttcctagcctagtgattttgaagagcaagaaggcagggtggacctggggaaacccgggtaagacatctgctagtgattgtgagctgagaggtgatatacatgagcggggaaacccagatcagggcagccttaggcctgaaaactcctgtgtgtgtccagctgatctctattatgataaggtgctcgaataaggaaggtttgtatcctgggccctgggccctggcccctgccaacatttccctctcacctcctctcacctccatccaaaccaggaagcacaagcctatgcagacgacaacagtttgctgttcatggagacatcagcaaagactgcaatgaacgtgaacgaaatcttcatggcaataggtcagttgcttctcctcccctcctctctccaccacagcaagggcatatcacctgtctgctggtctagagtgggcctgcggggtcccttcaccactctttttttttttttttttttttttttttgagatggagtctcgctctatcacccaggctggagttcagtggcacgatctcgactcactgcaagctccgccccccaggttcacgccattctcctgcctcagcctctcgagcagctgggactactggtrcccaccaccactcccagctaattttttgtatttttggtagagacggggtttcacggtgttagccaggatggtctcgatctcctgacctcgtgatccacccgcctcggcctcccaaagtgctgggattacgagcgtaagccactgcgcccagcccccttcaccacttttaaccttctgataaaattgttttcatcatcacctgactcccagatgtagatgttggttgttcacccgagaagttcctgaagcctgggccagagtctcaacatttcactctctgagcctgtagcctgccacccatttcagagcctgccatcactacccctacccactgcctaggagtttttagctcatttggctctggaatcttccttcctgggttgcagatcctggctctaccactcattagctctgtagtcttgggcaagttatttaaccttwctttgccgcagtttcctgaaaacaatcagaatgcacctgacacacagaagccctcaatatgtgagttaccactgattgggtataaaggccagaatctgctccagtggaactgggagagttattggggtacccccaacaartgcacttttccccctcccaaacagctaagaagcttcccaagaacgagccccagaatgcaactggtgctccaggccgaaaccgaggtgtggacctccaggagaacaacccagccagccggagccagtgctgcagcaactgagccccccttgcctgcccgctgcccccgcctcctccgcctgaatgacccgactggaatccactctaaccaatcgcacttaacgactcgggccaccaytgggggggcagggggaggggtccaccatgatttctccatataattttgatcataggccggagtgagtcattccacctgcacytttctgtacaaatactaattcaattttaagtcttaagtcacttttttaatatatatgatcttctgctcttcccacttcctcccctttctactgctctcccattttcccttgctgggagtagccacatgctcttgccccccaacccttgtatatggggacagtggggtcagtgcagctaccctttctttccctcctgcggaacagcggacccagcaagagcatccacatcctcactttgttcggagtggtctttggtttgggcggtggggcagaccttgggaaggggcttaggaagggagaggcagctcttccttcagctggctctcatcaggctgcagccccctccccgctcccacctccctgctgggaaaccacagcattatcacagcattattgtgacagccacgaacccattgcccacaacccctccaccctcggtcacmccaacctctggctytgagccctgttctgaccaaatcatgatgatgagtatttgggggtgggtgggtaagggggggagtgggaggggacggaaccaacyttttctgtattttgtattgtatgttttcttcaacatgtaaccaatcagtatcttgtcaatatagtcagccgatcgatcgacctcacaattgtcttccttgtctttctctggcagtttatcagacagtgccctctgtagttgaagttgatttaaaatgaaccactgaatcttgttaaacaaaatcttcccctctaatgtgaggggatgctggtggtcatggtaaccaagagaaagaggctcttactgttagcagctccgatgaggtagctgacctgggctgaccaagtttgaagtttcagggcccgtgttcacttctccacctcccttcccctcccccacctaccagatcatactggggtgacatgcagtgtgtatttgatgatcattagtctctgaaacaccagaaacaacctctttgggtttttttggttggtctttaccagtgagagggtctggatcctctctcttcctgaagaggaaggaatcccaacagcccctggaacgctggactggtcttaaggccaagactgtagccactggctttcctcaccacctctgtccacgtcacccccccacaccacatccaagttgccccagtccagctctctactggttctggaatcaggtctgggcactcagctctctgctgctacctgttggagctgctgctcagctagggccacactctcctccaatttctcccagggccacagaggcctgattcccttttttttttttttttctttttttgagacggagtctctgttacccaggctggagtgcagtggtgctatctcaactcactgcagcctccacctcctgggttcaagcgattcttctgccttagcctcccaagtagctggaattacgggcacccgccaccacgccctgctaatttttgtatttttagtagagacagggtttcaccatgttggccaggcttgtctcaaactcctggcctcaagtgatccacccgcctcagcctcccaaagtgctgggattacaggcgtgagctaccacaggcggcttttttttttttttttttttttttttttgaaacggagtctcactctattgcccaggctggagtgcagtggcacgatctcggctcactgcaagctctgcctcccgggttcacgccattctcctgcctcagcctcccgagtagctgggactacgggcgcccaccaccacgcccggctaatttttttgtatttttagtagagacggggttttaccgtgttagccaggatggtctcgatctcctgaccttgtgattcgcccgcctcggcctcccaaagtgctgggattacaggcgtgagccaccgcgcccagcatttttttttttttttttttttttttttttgagacagagtctcactctgtggcccaggctggagtgcagtggcaggatcttggctcactgcaacctccctccacctcccaggttcaaacgattctcttgctcagcctcccgagcagctgggattacaagcacacaccaccacgcctaatttttgtgtttttagtagagatggggtttcaccatgttggccaggctggtctcgaactcctggcctcaagtgatctgcccgcagaggcctgattcttggtggaccaccaccttgagggtgcctttcctgcctcctgtgcctccagtccctctacctctgacttccatccccagaaaagacaacggacaccaaggctgctgcacatcgcgtcgtttgtttaccgggtcaggttggaagccttagagccgaggctcccgagtctcggggacggtcctgtttgggcttcagggagggccagcgccacacactggcctctgacccacagctgcccggagggggtcaggcagcaggtcatggcggtaggactcaggttggacggtagcattttccggtgcaccttctgtgacatgcggtaactgaccctttccgggtccctgacgtccagttgctgctgtccggtcaccatcagccattggccatccacctgcaccaccagttcctccggggcgaagccgtgggcatccagcttcatttggaaaccgtctctggcatggtcattgtcctcctgagccgctggactgtccctgagcagccgcaccggcattgtggccacccggttccgttcagcaaggcccacgctgggacaccgggatgccacccggctctcgttggagaaggtgttaccgactctctgcatccgagtcagcaactaactgctgtcaaagggcgcgaggctcccagcgcagagctaggcgcacggacgcccggagaggagggacctcgcgcggcctacccgagctcagctccgctcgctcggttcccttcgcttctgcaaacgcaggcggagttcgggatcagccacgcccatcttacctccaagagccagactgtcagcgccctggcgcgcccgcagctgctctcctcccagactccgaccctttctccgcccttccccaccttcgttaatggacccggggaggccgcagctgtgaaggaactggatccacgaccaggccagacccgagggagccgcaccctggcgcagccaacagcagattgatcccccagctggaagggggctgtcttgccttctaaggaccaggcctggggcaaggattgttcctagacagagccaggggagggcggccttcctgggtcatccaccctacctctccctgaccacccacaaccccacgcggacacgcgacacgaggaggtggactggtctctccggctgcattaattcttcccggggcgtcctgtgctgcaggctgtggtctgggctctggggccacaaagatgaagacgcagttggggcttcaggagagtggctcccagtgcacagagaaagacctagccctcctccgcctcaccctccacgtcagtagccttcttggtgaccatcataaccacagctatgcctctggtgctgttatttgataattttttttttttaagagacagggtatcattatgttgcccaggttaatctcgaactcctgggctcaagcgatcctcccatctcggcctcccaaagtgctgagattacaggcgtgagccacctcgcccagcctataaactttattttttatttttttgtagagattggtggggggggtctcccaatgttgcccagcctggtctcgaactcctgcagggctcaagctctcctcccgcgtgagccagccacccggcctgataaactcctttttgttgagtgatactattaaatacatacatactgaaaagcgcagaaaaaggtgcaggtgaatgtcaggaggagaacacacccaagtcaccaccacactactgcagaactgttgctacatctcatctctaccgcagctgcaattccgtgtccggagccgcgtggggcagggcctgtgcgggagttgggggagggggttaagtgggagacaggcgcgtgaaagaggcagaccccacgattctccccaagactccttgtccccaagaggacagccatcgtgactctcccggactccattaaaagagattacaagtgaagaggggtcaatgtggggccttcactcaggcctcacttggctgtcaggggccaagagacaggacagaaaagtctggaagctggaggcagtgaggggaaggcgcgggaagactacaactcccgtcatgcgccgcgcagcaacgcctgcgcactgagcgctggttgcccatgcggccctagggctgggagcgcggcgccgctctccgctgcgggggaggccatggcggaaccttcccaggccccgaccccggccccggctgcgcagccccggccccttcagtccccagcccctgccccaactccgactcctgcacccagcccggcttcagccccgattccgactcccaccccggcaccagcccctgccccagctgcagccccagccggcagcacagggactggggggcccggggtaggaagtgggggggccgggagcgggggggatccggctcgacctggcctgagccagcagcagcgcgccagtcagaggaaggcgcaagtccgggggctgccgcgcgccaagaagcttgagaagctaggggtcttctcggcttgcaaggtgggggcggggcctggggtgaaggggcggggcttggggcatcccagggctctggtgggaatggggtcaaagctctggctgcggagcggctcttgccccagaggtataggtcattgactgatccttccacctccaggccaatgaaacctgtaagtgtaatggctggaaaaaccccaagccccccactgcaccccgcatggatctgcagcagccagctgccaacctgagtgagctgtgccgcagttgtgagcaccccttgggtaaggcaggcagcgcccttggagctgggggcaggtgctgggtcctgcttggacagggtgacaagtgccacaaagcttcatctctgaaaaaatcaaagatgcctcgaaggagggattgggttgggggggggtgtgcaccaaggggggagaaaggaaatctctcagcccagaacaggcccaggcaacccaacggttgatatcggagcagtcagtctcactgttggtcacactggttggaggaacagagtgtgtatcttgcttggctgtgaagagggtcaagaagccttgttgatttcttctatcaatttttcctaactctgccatctgtcttgcagctgaccacgtatcccacttggagaatgtgtcagaggatgagataaaccgactgctggggatggtggtggatgtggagaatctcttcatgtctgttcacaaggaagaggacacagacaccaagcaggtctatttctacctcttcaaggtgagcttccactaaaggagggtgtgagtgaaggaggtggggccttgaggggttgtctgcagctctgcccccctcccctctatgcccccttcctcttctctctagctactgcggaaatgcatcctgcagatgacccggcctgtggtggaggggtccctgggcagccctccatttgagaaacctaatattgagcaggtgagataggggaattggagatagcggataggagaattggggacagcttggaggagtggggagcctgtgttctccattctcctcaagctgagaacactggggaggttcagagaaggaagggtgttttgtgctaacctcagggtgggcatggtggtagggagggggcagagcttttctatagagagcacccgagagagagaggagaaggagaaccttgtccctggccagggagcatcttcctttgtctaagaaggccctgcgggctgctcacacctcattcctggttttatcccccacccaccccttctcagggtgtgctgaactttgtgcagtacaagtttagtcacctggctccccgggagcggcagacgatgttcgagctctcaaagatgttcttgctctgccttaactactggaagcttgagacacctgcccagtttcggcagaggtctcaggctgaggacgtggctacctacaaggtcaattacaccaggtaggcccagccaggggcagcttcgggggaggcttgcaggcccagcctgggttcagtggtttccgccctcacctgtctccccctcgaccccctactccagatggctctgttactgccacgtgccccagagctgtgatagcctcccccgctacgaaaccactcatgtctttgggcgaagccttctccggtccattttcaccgttacccgccggcagctgctggaaaagttccgagtggagaaggacaaattggtgcccgagaagaggaccctcatcctcactcacttccccaagtaaggctccttctggcctaccaggatttggccccaagttcacatcctccctgttgtccccttttttccaggaaggcttcctggattggtccctcctctccctccatgggccttttgggatctgggcgtctacctggcagacttgcccatggcccagaagcaacttgctagtactagtctggggatggcaggtacatagcccaagctaacgctgcccccacccgaccctacgccccagtagatgttactaattgtttcccatgggggcct

SEQ ID NO: 97439 - DNA, 89828 bp, Homo sapiens
ctagaccagcctgctcaacacggtgaaaccccgtccctactgaaaatacaaaaaatagctgggtgtggtagtgcacatctgtggacccagctacttgggtggctgaggcaagagaatcgcttgaacccgggaggcagaggttgcagtgagccgagatcactccactgcactcctgcctggatgacagagggagactctgtctcaataaataaataaataaataagtatttaagcaaacataccagaaaataatcttttagaaatgcagtgatttttttttattttaagcttacctattttcattgaaatttccagtatactttgccccatttgggaatgtgtaagtccccagtccatgaaacatattatccttaaattgtccttcatatactgctcctgaaaaatgctcaagtcttccaaaaccattcatctgtttgtaacaaaggaaattaccttagaaactaatcttcagtttcccaagaacctttaaaaaatgtacaaatataagtctatcatctgctaattattacttaaccaactttgtattgtcctttatttccatagtataaagacaacatttttatcattttccttcatctgtatctatctgtgaagcccagtaaatcaaatgttctggatctgggacatttgaacatcagggggtccatgatgaagataaataggggtcctcaagataccctgaatgtatcagaaatcttaaagggcaaccagtttagttagttcaggaaaccagtacaaagtagttgttaagaattcaaatttggatttgagcagaccagggtatactttcctgttttatcatttactagctgggcaagaaacctgagcctgattttcctcatttgtaaaatagagtattaatggtacctatctcatgaggttattatgaggattaaatgagaaaattatgtaacggattcagctttactcaatgaataggagatgagaaagaaagtaacgatgattagctttctacagtgagtttaatattactcataagttaatatatgttaatatgatcatttgttatttttattatatagtctactcattataggagtttttgattaatggtgaaatgcctggaatcactaaacctacagggttatttatccactgccaatattaaaaacaacaataataccttgtcatctttccagcttcctgtgtagacaatcccattaggagtggtatgaatacctattccatttctctcgtagattccagaagatgttcttgtacagtcaccatctaaacagaggagaaaaactgaagattataaatgagaatagttatgtctgggcctaatcgcaactacacctcatgggtttctttggctccctagcactgaaaccagtgagaccagagatgagaaaatccatggacacagaacatcttgtaacaattgagactcaagggccaggaagattgacagatcccataggtttccaaggcattggaattttgattttaaaagctctttatctattaggatttctgttattttagttaataaagttaatatcctaatagtagttttataaaatttaacagtctcagttttttattcctaagctatttaattttctatacagaaaaagtaattgaagcgtatacttaccatacttgtctccatttggaaagataaagctgatcttatacacttctgaagctgttttaaaagatttaaaaacagtgacataagtttacttttttttcgatagaggcaaggtttcactacattgcccaggccagtctcaaactcctgggctcaagcgatcctcccgcctcagcctcccaaagtgctggggatgcaaatgtgagccaccacacccaaccaagtgtaaacattcttatgtcataagacctatacccaatgtgctttcagcactatccaaatggacttacttctcaagatcacatcatatcatgattacttggtatttccattgtctaatgtagggtcccggggaaataaacaattttgcctagatgatctcttttaaaatttatttattatgatagctttattaatatataattcacacaccacaaaatctaccctttaaaaaaatacaatttgatttttttagtatattcagagttgtgcaactatcatcacaatctaattttagaatattttaatcatcccagaaagaaactctgtacacattagcagttacccattatgattcccctcaaacacccctcaccccacaaccccaaacccctggcaaccactaatctactttctgcctcagggatttgcctattctggacatttcttataaatgaaatcatataatatgtggtcctttatgtctggctcgtttcacttaatgtttccaaggctcatccatgttgcatcgtgtatcagtacttcattcctttttatagccaagtatattgtataaatatgttgtacagaaatagcatattttgtttattcattcatcagttcatggacatgtaggttgtttccagtttgaggccattatgaataatactgctataaacactgatgtacattttcaaaacatacagcttcctaggagtaaaaaaaaaattggtgtacagatttttgtgtggatatgtttttatttctctttggtagcccatatgatttactgattgtcccacagaggtaaggtggagtgaggaatctttaaattggcaataggaagaaatggaaaataaagatagcaagtggggaagggctggtaggtccacacagaatgagactggaatggagaccaagtgaaaaaggaagaaagaggaccgcaagactgagggggactctgggcctcagatccctggacacttactggactaaaactagaaactgtattttccgatactgaagaaaacttatgtagagacggtatgcaggcccatccttcagaatcacctgagatgcttctaagtttcttctctctaccccacatctactgaatcagtctttacgggtggggcaagggaatttaaaaattaatttaggtaccacttgagaaaggcttggaggctcatcactgaggaaacagagttaacacaataggtagaggacttaaactgtaacatcctcagagagaaagggagagtattagtatccttgaaataggaacaggtgattacaaaaaacaaaaaacaattagcaatccaggaaatgaataatataattggtgaaataaaacttcttagaagggatgaaaagcagaatagatacaattgaaaacaaattagtgaactggaacattaggttgaaaaatgtgcttagaaagtagcacaaagtgtgagtgagatggctggaaaaaaaattttttaattaaaaaaaaagaaagtagcacaaagaattttaaaatgatggaaagtggatccaaaaggctactgtcagtctaataagaattccagagggaaagaataagggatatttgaataaatagccaaatttttctcagaactgaagaaaatgactgcttggactacaaatgggaactaagcaaaatcccacacctagacaggttacagtacaatttcatgacataaagaccaaaggccagctaggctagttaaaaacaagcaaacaaaaaccagattacctacaataaactacaaaggactgacattagcaacagtggattctaaaaaaaaatggcactatgtctttaaaattccgagacaaaattattttcaacctaatattctacatccaacgaaactatcaatctaaaatcatggaaactggcaggcacgctggtaggatgaattactggctcatgcctggaatcccagcacttcgggaggctgaggagggtgggttgcttgagcctaggagttcgagaccagcctgggcaacatggtgaaacccattctccacaaaaaatacaagaattagctgggtgtggtgttgcatgcttgttgtccatgctacttgggggctgaggtgggaggatcgcttgagcccaggaagtgaaggctgcagtgagtccgatcacaccctgccctccagcctgggtgagacagcaagactctgtcttaaaaaaataataaaataaaaaaaattaagttttaaaaatagaatctggtggctcatgcctgtaatcccaacgctttgggtgggtgaggtgggaggactgcttgagcccaggagtttgagaccagcctgggcaacatagtgagattccatctccaccaaaattaaaaactcaaaaagaaaaaaaaagaatctgtaactaaaactcaggtaatatcaatatggaaatggtgtggaggatagagagcaatcttgctagaattctgatctcgtttaggggttaaatatagacactaattaacactaaatcttagaaaaatctgaatttagttatgtttgcttattttttccccataatttctaagatttggttgtggataaagggtgaagtatggtggtatatagaaattgccatgtgtgctcattaattagttatttacatgtctgcaagatgtgaaattccaagagagcagggacacagagctactttctttcttttttattttttaatttaatttaatttaatttaatttatttatttatttatttatttttgagacggagtctcgctctgtcgcccaggctggagtgcagtggcttgatctcgtctcactgcaacctccgcctcccgggttcacgccattctcctgcctcagcctcccaagtagctggaactacaggcgtcagagctactttctaagtgtttaactaatgataactaactagattaccagatctgcttgtagtttcccacagatgccatgccgtactctgggtggaacacccttctcttctttacctggttaactgctattcatcctcaagagttggcaaaatagagtgtagtagttaggggttcatgctctggcatcggactacctacctttgcatccagactccaccattttctctgaccttggacaaataattatcttatgcctcagtttcctcatccttagatggggcaaatcaagtaaatgagctaatctagttaaagcacttagcccagtgtctaaactctgtaaatattagctattgtattcttgtagccccagctcaggtatgagctctcccacaaagcctttcttctcattacttgtcaacctcagactccttcaggaacccccacggcactctgggcctattcctactgtagtacttaaggttctattaaaaccatgcttttgtatcgggatcccctatcccacccagttcctccaggacacggatggcagattagtcaaatctcttctcaccccactgtccgactccgtgtttagtactaatagtaacagaacgtctagtgaatgaagggcacttcggaaggaatcgttaagtgcctatgaagcagagcattaaacgtaatcatatcagaaactggactgttttcaattgccgctaaaatgttctacattcgaaacttgggaacgtcagagctagagggaacctcacagagaccacccggcaccatagcggaaactgaggcccagggaggttggcacgcgcctcgggtgtctcaacagcgaattaacaacagaatcagagctagattcccagaccaggggttcccccgtgcccctcggctagacggtcaggaaatatatcacacccccacaggagttaccgggagccaagcaggttctgactccacgctagttcgacttaaaggagctcttctctgcccgggtcgttaggaggagggacactcacttggccgagaggtgttagagagatcttccaaactctgcgactccccctgggcggccagctctgcggccgggagagaactaggcgctaggacagctccaggtgcgacttggttgctggggcgaccgggcacctctcacccggaagcgaatacgcgaggggctgtagctgagccaatcagaaggcgccgggactgtgccgctgcagctgggccaccgcagggctgctccaagtgagaatcgtgagggtggccaagtccagtttggacctctgacccttgggcagcacctcccgacagccggctcgggacccaactctgcgagccaggtacgtcttccacttctgcggacaagtgatgcgcgttgtgcgcacggtgtgcgcgtcaccctgtttgtcagtgtgtctgccgcctcctgctccaggagtggtcgggatctgacgagcatcgcggcccaktgtgtttcatccagtctgcctggggccggtgaatctggaccagcaggatcccaggccctgataccgaaccaaggcgggctctgccgctgaggttgtccacgctcaaactgcaggttggggccggggggrgcggggcgtgaaattcagtcttggagcaggctaaggggttgattgaagggatcaggctccgttctctgactccgtctgtgtggcttttttggggagaagggtggggacgatgtgagttcgaaaaaggatacgagatctggatrtctggatggagctggatatattgtgatcagtcagagatctgcctgggaggagagtagtgtgtagtcacttttcagtgccttggctatcaaacaaagaatactcttacagccaaacttaggtccctgtatccatggtgaagaaagatagttggagtcttcccgggctagatggaatagatagtggaatctaaccacgtggattatacaacctaattcctattcccttgaaaactctgggagagtggtattggacaccattacagtcagtaaatcttcgtttaaaatgttaagcgcatatctcagatctagttgtaaaagtaacattttctgggttggtgtgagacaacttgttttgattcagcgtaagtatcctcttgctttttcctaatgtttctcagtacacaaatttacctgggctgcatggtttttgagatgaagttctaatctaactgatttgttatttcatttccctaaattttagaaataataggtaattattggtgcacaaccttacagaattcagtttgacctgttatttttcttgcctgttaagattttaatgactctacatttttgtgagtaaagttgacgtttgaacaacatgggtatgaactacccggctccacttacaggtggatttttyccaacccaacacagattgaaaatacagtatttcaggtcgggcgcggtggctcacgcckgtaatcccagcactgtgggaggccgaggcgggcggatcacgaggtcaggagatcgagaccatcctggctaacacggtgaaaccctgtctctactaaaaatacaaaaaattagccgggcatggtggcgggtgcctgtagtcccagctactcaggaggctgaggcaggagaatggcgtgaacccgggaggtggaggttgcagtgagctgagactgcgccagtgcactccagcctgggcgacagagtgagactctgtctcaaaaaaaaaaaaaaaaaaaaaatacagtatttcaactaggcacagtggctcatgccggtaatctcagcactttgggaggccaaggtgagacgattgcttgagctcaggagtacgagaccagcttgggcagcaaagcgaaacctcatttctactaaaaaatgtttaaagtagctgggtgtggtggtgcacctgtggtcccagctattcaggaggctgaggcaggaggattgcttgagcctaggagatcgaggctgcagtaagctatgatcgtaccactgcactgcagcctgggtgatagagcaagatccagtctcaaaaaaaaagaaagaaagaaaaaagaaaagacagtattcctggaatgcaaaacccacatacagagggccaacttttcctctatgcaggttctacagggctgactggagaacttgagtatccgtggattttggtatacatgggggttctggaaccaatcccctgtgtataccgagggatgactatttcatggctcattctgtcaatttcttccggatgtcctttaaaatctcaaagaggccttacccaaccactctatctaaaataactgcctcaggggttttttttccttgatagcacttaagttataatatatatctatttgtttaatgtctgtgttaccctctagaaggtaagcttcatgaagcagaaattttgtcttttttgctgttatatccccaggatctggcacataataagtgctcaataaatatttgtggaatgaataaatagatgaacaaatctccattcccacataagtcattttttcaacyttcaatcattcattccacaaatagatactgaattcctaccatatgctagacactgtgttaagggtacagtggtaatcaaaatagacatagtcttgttttcaaagagctttctgggagtagaaaggagagacaaacttaagataaactctgaatacatatgtataatcatcagcaattttgaagaaaggaatacctaggaagacctagtttaatatacacatatttgtgagtttcccaaattttttctagcttttgatttctaattccattttggttggagaacatagttcatattatttctttctttttacatttattgaggtttatggctgggcacagtggctcacgcctgtaatccctgcactttgggaggccaaggtggacagatcacctgaggtcaggaattcgagaccagcctgaccaacatggtgaaacaccatctctactaaaaatacaaaaattagtcagggagcatggtggcgggtgcctgtagtcccagctactcgggaggctgaggcaggagaatcgcttgaacctgggaggcggaggttgctgtgagccaagattgtgccactgcactccagcctgggcracagagcaagactctgtcttaaaaaaaaaaaaatgtattgaggtttcttttatcacctagtatggtctatatcctggaaaatgtttcatgtgtacttcagaagtatgtatagttygttgttgggtggagtgttctatagacacctattaggtctagttggttagagtgttgttcaagtcttttatttccttgttgatcctctgtctagttgttctaccattaaaagtgaggtactgtagtctcctactaytattattgaattgtctaattctcccttcatttctgtcagttgttgctttgtgtattttggtgccttattattaggtacatatgtgtttttaattgttatcatttcctggcagattaacccttttatcattaagaaatatccctatctctagtaatattttttgctttaaagtctgttttgtaagctattaacatagccactccacctttcttgtagttgctgtttgcaagatcatctttttccatccttttacttttcatttattgtgtctttgaatttaaagtgcctctcctgcagacagaatatatttggatcctgtttgttaatcaagtctgacaatctctgtcttttgattggactgctttattctctcacatttatttttattgtctatatactgagaattacatctaactctattctacttttggatgtctgtatttctcaatgtctattttttcttctgttcttactttatgctttcatttgcatttagtcattaagtgaatattttctaatgtagtatttttgtgattgctttggggtttatgaacaacttcagatttatattagcttaattccagcaatattgctatggtttgaatgtttacccccaaagttcatgtattagacatttaatttccaatgcaacagtgttaggagatggggcctaataacaggtaattcgatcatgagggcagagcccttattaatggtttaatgtcactagcatgggagtgggttagttatagcaagaatgagttattaggccgggcgcggtggctcacgcctgtaatcccagcactttgggaggccgaggcaggcggatcacaaggtcaagagatcgagaccatcctggctaacatggtgaaaccctgtctctactaaaaatacaaaaaaacaaaaacttagccggcggcggtcacctgtagtcccggctactccagaggctgaggtggaagaatggcatgaaccagggaggcagaccttgcagtaagctgagaccacgctactgcactccagctggggcaacagagtgagactgtctcaaaaaaaaaaaaaaaagaatgagttattataaaataagtctggcagctggtacctctctctgtatcgtgcccacttctgccttccatcttccaccatgagatgacactacgcagatgccagcatcatgctcttggacttcccagcctccattaccatgagacaaataaacttctgttgtttataaattacctagtctgtggcattctgttatagcagaaaacagactaagacagatacatagaagtattacttttatatagctctattcctttcctcctttttatagtattgttatacatattatatctattaatgttatatacccaactatacttgttacaagtattactttactgtctgtagtcattttctcagcacagcacaattacgctcccaccaatcttctttgtgctgttattggcaaatatattacatacatattaccttcttgtaggtgacatgcccaacattatatcatatacatattattttatataactgctttttaartcatttcagagaaaagaagagacaatacttttgtactggttttcaaataaataaatgtccaatataaatgtggatttttaaaaataattactcaattacctttactagtactctttgttttttcatgtagatttaaattaccatccagggatacttgcctcaacttgaagaactgttagtatttcttgtgaggcgggtctattgacaacaaattctctcagttttgtttgtctgagaaagttttcattttaccttcatttttgaaagatagcttttctggatttttggttaactattttttgttgttttttttttgttttttgttttttgtttttttgagatggagtctcactctgtcacccaggctggagtgcagtggcgcaatctcggctcactgcatcttctgtctcccatgttcaagtgattctcctgcctcagcctccgaagcagctgggactacaggtgtgtgccaccacacccagctaattttttgtatttttagtagagacagggtttcactgtgttagccaagatggtctcgatctcctgacctcgtgatctgcccgccttggcctcccatagtgctggaattacaggcgtgagccaccacgcccagccctrtttttttctttgagtattttaaatatatatgtcattaccttctgccctccattgtttctgtgaagaaatcagtcattaattttattggggttcccccctgtaagtgataagttgtttttctcttactcctttcatgattttctctttgtcttttgaccttcaacatttttattgcaacatgtctattttgtgcatctctgtgtttattttctaatagttggaggccattgagcttcctgcatgtagaggttattgatttttaatgaatcagagaagttttctaccattatttctttgaatattttttctgctcttttctttctttcctttccttctggtattctcattatatgtatatggtacccttgatggtgtcccacatttttccaaggctctgttcacttttcttcatttatcgttctctctgttttcagcttgcataatcaatgtcagtctgtcttcaagttcatcagttctttctcttgctagttcatgtttatggttgagcttctctagtgaatttttaatttcaattagtatacttttcaactccagaattcccatttggttctttttatatatataattttttatctctttattgatgttctcaatttgatatgacattgtcatcataccttcctttactgctttaattgtgcattcctttatttctgtgracatacttataatgactattttgaactccttttctgttaaatctgacatctgttctcactcataggcagtttgtgctttttctctccagtgtatgggttatacttaagtgtttctttgcatgccttgtgacttttttgttgttaactgaacattttggataacatactgtaacaactctgggtwctgattctcccctttcaggggcttcttattgttatttgctggtttaatttttagtgactggctagaatattttagtgaagtctatttccctcctacgattttaagcctctgttgttgctcctctgggaggtacagctttrggtatgcccatggttgattgctgaattgttttcaacaatgctctggagagtaaattcctttacaaactaatccaaccaaagtatggcttctttgaagcaatagtttctgagatcccagtttaatactcattctaatcccaaaaaggaacttcctagtgatcttattccttggtttgcttcctgcaaactagttggccaacagtctaaactacatcttcatttaatcctgtaatctccctttccccacaacctcactattcttgaaagcacctttaggtttgaacttctccacactccattgtaaatggagtcagtcctttggaaaaagattaggagctatctgtcttacggcctacttcccttttgcccttggcagaatctctgagcccaagctgtgttcctgatagagcatatataaatttaaattttgtcaaaacatatattaaatacatgaaaacttctcaactggatttttaaaatcctatgctaggctgggtgcagtggctcacacctgtaatccaagcactttgggatgctgaggtgcgcagatcacttgaggtcatgagttcgagaccagcctggccaacatggtgaaatcccatctctactaaaaatacaaatattagctgggcgtggtggcaggcgcctgtagtcccagctactccagaggctgaggtaggagaattgcttgaacccaggaggcagaggttgcagtgagctgagwtcatccggcctgggcgacagagcaagactccatctctaaataaataaataaataaataaataaaactctaaattagacctaaccaaatgagaatctaggattaaagcctagacatgtgtattttgacacttctccatgtgtttatgatgtacatctttagtttagaaatctgtatcagagacattcactaaatattagtcctgaggtagaagtgcttataaatcttttgtgaagatttatccatactatccctaaactggctggctctttttattttgtagttttaaaattttttcactggaacagattcagaatcctgccccaagaccagctctttttacatatgcattttcctttgtttctttaaagtagcctatattcataagtttggcaaacaaaggattatcatacatgtctggttttatgatgtctacattaatttttttctcttgcaggtgaaaatgagttcttcagtaagaagaaaaggcaagccaggcaaaggaggtggaaaagggtcttctagaggaggaagaggaggcaggagtcacgccagtaaatctcatgggagtggtggcggtggcggtggtggtggtggtggaggtggcrgcaacagaaaggcctccagtagaatatgggatgatggagatgacttttgtatcttcagtgaatcaaggcgcccttccaggtcattataactctttgaatgtttaaatatggaaatggtatcaacccctaatgtatgggacaacagatggctgagaatggaaaaaaagtcgagtaattctggtcaaattgtcttcctctttgtaacccttttctgaagacatgatgggaaataacagcttttgtgtgtatgtaggttgcatgacactgtgaattgagtgtaatactgctattatacccagtgttactaggaaagtaaatacagaaatagtgtgatgaaaattattttaagtattccttatgcatcatagactgatgttaaaatgatgatgttaacattgaacatggacaggtacggtggctcacacctgtaatcccatcactttgggaggcccaggtgtgtggatcgcttgaggtcaggagttcgagaccagcctggccaatagggtgaaatcctgtctctactaaaatacaaaaattagccaggcatggtggcagtcacctgtaatcccasgtactagggaggctgaggcaggagaattgcttgaacccaggaggcagaagttgcagtgagctgagatcacaccactgcactccagcctgggtgacagagtgagactccatctcaaaaaacaaacattgaacagcctaaagtgcaacatgactgtactgtgtctttctagttgatgagctgtgtattttccagccaaatcagccatcatctgatggtgttacatgtggtgaccagtaacagatgccttatctaggtttctctcctgttcaacttttaactaatgaataaattatgggaattctagtaattctaatgagtatttaataaaagtaaatgttttgctattgcatgttatacagtataactacaattaggcatcacttagtgacagagatgtgttctgaaaaatgcattgttaggcaatttcattgttgtgcaaacatcatagaatgtacttacacaaccccagatggtacaacctacaacacacctaggctgtatgatgtagccaattgctcctagactacaaatctatacagcatgttgctgtactgaatactctaagcaattataacacaatggtaagtatttgtgtatctaaacatgtctagttgtagaaaaggtatagtaaaaatagagtataagagattaaaaatgatacctatgtagggcacttaccgtgaatggaagttgcaggactggattttgctctgggtgagtcagtgaggaagtggtgagtgaatgtgaaggcctagggatattactgtacactactatagactttataaatagcaagcagcatagtctctctatgttgcccaggctggtcttgaactcctgggctcaagcgattctcctgccttggcctcccatagtgttggaattacaggcgtgagccactgtgcctagccaagaacctaacttctgagttagctgcagctccatagtttttcaaaacatggacattataggttcttggagtccgtagatgttcattcatttggtaagtatttactgaatgcctaccatgcaccaggcactgttttagggacttggaattgcagcagggagtaaaatattgtccttatctagatagaatgggatttgagatagaaaaaccataaacaaatgtataacattaccaggtgccgcatgctatggagagaaataaaggagtgtaacagggatataaaataccaaaatagaattgttaatttatgtagaaagcccccctaataaggtatcacgtgaagagaggcaagaagtaagtaaaggaataagctgtgaagttctgagtacagcattcaaggcagagggaagagcaatttcytaaggcaagaatgtgcttggaaggtttaggaaatagcaaagaaccatgtggctagaatgagtgggcaagaaggcaagtggtaggcaattagatcagaaagrccagactgtataggacttcatgggccattattaggactttggcttttacatgaagtaagacagaaggcctttggagggtttgaggcaagggtgtgtgatattatcagtcagtctggccagagttgtttctattcagtgtatgcctttatgtgaattagaaaatggtgctccttcctttggacagttatagccccacaccaggatcatggcttagccagcagaacatggaccggattttgctgtcccttcctccctyttcttccctcccagccaggaacctttgtgcagtgtacagtctatgaatctatactcaatagcattgactgggtgtgctttgtagagaataaactataaaggggcatgagttgaaagcaaggagaccagttaggagatgttctccaagtgtagatataaaatagataatttaatatataaatctgaggttcaagaaaaagatctaggctggagatgtaaatgtgtgagtcttctatagataaatgctaaagttctgagtctggataaaatcgaatagagaaggtatctgatgtttgagccctgggacactctaggttttaaagctaagagaatttggaatgttcccaacacaaagaaatgataaatgtgtgaggtgttagatatcctaattaccctgatttgatcactacacattgtatgcatgtatcaaaatagcacatgtacccctgtattagtccattctcacgctgctataaggacatacccaagactgagtaatttataaaggaaagaggtttaattgactcacagtaccacagggctggggtggcctcaggaaacttacaatcatgctgaaaggggaagcaaaagcatccttcttcacaaggtggcaggagaaagaagaatgagagccaagtaaagggggacaccccttataaaaccatcagatctcgtgagaagttactcactatcacgagaatagcatgggggagactgcccccatgattcaactacctccaaccggttccctcccataacatgtggggattatgggaacttcaattgaagatgagatttgacttgcagccaaaccattatcaaccgtataaagaatgtacaattattatgtrtcaataaaaatttttagttaaaaaataaataaagctaagagaaagtatgaaaaacaaaggggattgagaaggagctgccaatgaagtaggaaactaagagagtggtttttggaagccaagggacaaaggtgttttaaaggagagtagccaataagatcgaattgtatgcttaaagagggtacacatttgtggaaaaatgcttctggtaggycaaggaaaatgtgcactaagaattgtccactgsatttgacaatgtgggtatcatggttaacyttgacaagagctgtagtagcataggaaatactgattgggttgtgtttcagagagaagaggaaagaaaatggagacagagacaatgattttgataacctaaatgagaagttttactmtaagggagctagagggaggagagatgggtcagtagctacagggagatgtgcactcaagggaggatttggcttggtttcatttttttaagagggtagaccttatagtatgtctgtatgctgatgggaatgatccaaagaagaatgaaaaaccagtgatttagaaagggggataagtgctggaatgatttccttgaggagattaaagagattggcatatagtttacaaatagaaaggctgactttaagataaaggatgactttaagataggagcatgtgaaactcccaactccccctcatgtttaactgatcatttcctaatgatcagacaaatcataagagattatatatgctgtgtaatttttttatttctttttttttaaatagagacaggatcttgctatattgcccaggctggtctcgaactcctggggcttaagcaatcctaccacttcagcctcttaaagtgctggaattacaggtgtgagccaatgcccctggccttttttttttttttttaataatcagaaataaagataattgggtattttagaaatggggccttaatattcacaaggaagaatgaaactcagtggttttcagattttaatgcagaatgaaatgaaatgctcttcatgtcctatagtgcagaggaaaccatcattagcattgctttttcctaaggattcttgagttagtgaagccagaattaatgattaagaatctgttaagttttgttgttttttttttttttaaacggaatctcgctctgttgcccaggctgtagtgcagtggcacaatcttggcttactgcaacctctacctccaagttcaagtgattctcctgcctcagcctcctgagtagctaggattacaggagcgcactgccacgcccagataatttttgtatttttagtagagacagcatttcaccatgttggccaggctggtctgaaactcctgacctcaggtgatccgccagcctcggcctcccaaagtgccaggattacaggcgtgagccactgcgcctggccaagaatctgataaggtttttttccagcaggtctgatataatgaastctggtaaatactatagaaaatggagaatctcctcacattcattgtcatcttttgtaagatacttgacaatccagtttgtattgtgtatatctggggacccctgaggagagtgtaaaagttctgattgaagrtatgtgtgtaattttgctcttttgttctctatagacctagcaacagtaacatargcaaaggagagtcacgcccaaaatggaaacccaaagccaaagtaccccttcagactctacatatgacttctgagaatcaagagaaagtgaaagctcttctccgagacctgcaagaacaagatgctgatgctggatctgagtaamttgttttatttgagtcaattattatattaaggaaaacatactggcagtgtgaaggtcctgtgcatctttggaatgctgtgtcagtactgattctaytgtggccatttaattagttgaaagtgagccaagagtaatacaagaataattattcagccacaattttagagtgagtttgttttgcaacatccatgggattgcctttttatctttatttttttccagggcagtgctcatatggattcagtaactgatttatctgtaaccttccagataaacccttgtaatgaacaagtagaagtagtgttgaaggagcaaatattgactcggtcaggtgcagtcttaggatttgcttgtcatgactgtctgcctaagagaaagcttttactcttaaatcttattcgtttcccactctactgcatttcggctcttttgctttggatttcagttggagaagttaattccttctttccatttaccaaaattaattagtggccagtcatgaacagctcattttccatcctatctacaaatctcttatctgttttagatttagaaagggagattatgtagcaaaacaaacaattagggatagtgtttttatgaatgagaagagagagaatagccaaggtttctgtggttaagaacacaggaatctgtctgcctttggcaaaatctctatttgctccttaatgtgtaacctaggcagttactaatcctctctgagttttagttgatcatctagaaaaaaaaaaaaaaaaggacattccagtagtatttggtacagttattgggaagattaaaggagttagttcatataaagcacttaacacagtaactggtatttaataaatgcctggtaaatgttaattgccaagatataaattaatagttcaatataagattaaatcagcaactgaagagtagtcaggatcctatgaattaaattcttagacctttgctaaatttttctttgaagtaagtagaaagtaatatctaatatatgaaaatgttgcctttgctagaagaggcctttctggggaggaggaagatgatgagcctgattgctgtaacgatgagcggtactggccagctggacaggaaccttccctcgttcccgacttggatcctttggaatatgctggcttagcctcagtggagccttatgttccagaatttacagtctccccatttgcagtgcaaaaactttccaggtgattgctttgatcatttatgggagttgggaaagaattcaaggaaaccgaaatcatataaacccactacccctctttgtgtactttcctwttatgtgggttccagcaatgcctgataggcctaatattctatcttatcagaaggggtcattcaggggggcttattgttatcagggatgctttttcaaaatacaagccctgcctatgtgtagtcataacttcatctaagcatatttaaatgaattttactgtaatggtgtgatactgctttttatgtgtcatttttgtcatgttttgcccttgacaggtatggtttcaatactgaacgctgtcaagcggtcctgaggatgtgtgatggagatgtgggagcatcactagagcatctccttacccagtgtttttcagagacatttggagagaggatgaagatctctgaggcagtcaaccagataagcttggatgagtgtatggaacagcgacaggaagaggcatttgctctcragtccatctgtggagaaaaatttatagaaagaattcagaacagagtctggaccattgggttagaactggagtatctgacaagtagattccgcaaatccaagccaaaagaaagtaccaaaaatgtacaagagaattcacttgaaatctgtaaattttacctcaaaggaaattgtaaatttggatcaaaatgcagattcaaacatgaagtgcccccaaatcaaattgttggaagaatagaaagaagtgtagatgattctcatcttaatgctattgaagatgcatcttttttatatgaacttgaaattcgattttctaaagaccacaaatatccctaccaagctccgctcgtggcattttattccaccaatgagaacctacctctggcttgtcgtttacatatttctgagtttctttatgacaaggccttgacatttgcggaaacttcggaacctgtcgtatattytttgataacccttttagaggaagagtcggaaatagtcaagttactaacgaatacccaccacaagtatrgtgaccctcctgtgaactttctgccagtaccctctaggaccagaataaataatcctgcctgtcataaaacagtgattccaaataattcttttgtttytaatcaaattccagaaggtatgtaaggcattgatcttgtggagggaggcattcagaatgatgggtttagaagtcaaagcctttaaggctggtctaggatggcttagtgatcttgaacaagctgaacaagccattaagtcccaagggcaaaagggaatgagaattccctgaactgtaattgtatctgactttaattgtaaggctcaattgtgttgctgtggttgggctccctgagttgaaagtttgtagtgacgtatgtttaactatayaaaatccgaggcttggaaggaccttaaggtacgttctcagaaaatctgttttatttaattcatttggttttcttttgtttacttcttatactgtatactgaattactttcaaatgaatttttagagatattttgctttctataccactatccataccctcctgcttttggtgtactagacccccagaattctttagggatagctctatgaatccctaaatcctcaaatacttgtgcaggcttctagctttgtctagatctaggtttactgtgcaaattctttttatttttatttttttaagatggagtttcactcttgtcccccaagctggagtgcagtggtatgatctcagctcactgcaacctctgactcccaggttcaagcgattctcctgcctcagcctcctgagtagctgggattacaggcatccgccaccacgcctggctaatttttctatttttagtaagacagggtttcaccatgttggccaggctggtcttgaactcctgacctcaggtgatccgcctgccttggcctcccaaagtgctgggattacaggcgtgagccatcgcacatgggctgctatgcagattcttacaccacaagtaagcccctttcaaagaattctctgctgggtgtggtggctcatgcctgtaatcccagcactttgggaggctgaagtgagagcactgcttgaccccaggagtttgagaccagcctgggcagcataatgagaccccatctctagaaaatatatatattttcttagctagtcagccatggttgtgcactcctctgagtcccaggtactcaagaggctgatgtgggggaatcacttcagcctcagaggtagaagctgcagtgagtcattgcatttcggccttggagacagagtgagactctatttcttaattaaaaaaaaaaaaaaaaggatcctcttttattggttgccatctatctttcttccagagaaacaaaagtttgtattatttcatgagagtccttgggtaaacttcaatgagtagagaacagtgacactgttctgagatgtggctgctggtcatttagccagattcactcactaaccacccgacccactcccagatggcagcttctagcgcatgggattcaaatgtgttccttgggaaatgaaaattatgtgtcatgcactttttttctaaaataatagttttattgagacataatttatataccataaaattcactcttttaaaatacacaattcaatggtttttagtatttttatagaattatgcaacaataaccaccttttaatccctggacgttatcatcaaccccaaaagaaaccctgtacccatgtacccatagcagtctctcctcattttccccttcccccagcccctcataaccacaaatctgctgtctatctctatggatttgcctactctggacatttcatagaaatggaattacacaatatgsagctttttgagatgggcttctttcacttagctaatgtgttcaaggttcatccgtgttctagcacatatcactacatcattcctttttattagtgaataatattctattatgtggacataccacattttgttcattgattcatcatttgatagatatttgtgttgttttacgttgtgggatttggggacacttgcgtacagttgaaacattcactgctaattcttttaatgctaattactttgtttgtgcttgataaaagtttatttgaggatgcattttaagttctttagaaatagaaatactagaaatgaatgaacttactttattcaagttttcactttttctccattttgactttttgttgttgatactctgttagacagcgactttccccttttgttaaagaaagggctccatactgaaatgttttcttttatttccttcaagttgaaaaagcatcagaatctgaggagtcagatgaggatgacggtcctgcacctgttatagtagagaatgaaagctatgtgaaccttaagaaaaagatttccaaaagatatgactggcaggcaaagtcagtacatgctgaaaatggtaaaatctgcaagcagttccgaatgaaacaggtagggtatgctgagagaatgagtaacgttgcctccctaatatctggatgatgggattaggaattagggagctttggctaccctccttaaaattcttctggttctttttctccctgagtggtcaaagtttctacaggccacagcaaacttaagtgcatatgctagatggttttggaaaatcctatagctggtacatagcaaacacacacatatatgccaaatagtctgagtcatgtgcctttggtactgtgacagacaatctggtatgtaaaaggaatatcaatactgtggtttactggccgggcacggtggctcacacctgtaatcccagcactttgggatgccaaggtaggcagatcacctgaggtcaggagttcaagaccaccctagccaacatggcaaaaccctgtctctactaaaaatacaaaaattagccgggcgtggtggcaggtgcctgtaatcccagccacttgggaggctgaggcacaagaattgcttgaactttggtggtgcaggttccagtgagccacgattgcaccactgtactccagcctgggcaacagagcaagactctgtctcaaaaacaaaacaaaacaaaataaaaacaaatactgtggtttagagccaggcgggcgtggtaacacatgcctgtagtctcagctacttggaaggctgaggcaggaggatcacttgagacaatgccagcctggaaaacataatgagtccctgtctctaaaaacaaaacaaaacaaatactgcgatttaccttagaaaaaattaatatataaaaggagaaggataaggaaggacttttaccctgtttcaaagactcaaaggataaataatgtgcccaagatcgcatagctagtaagtggtttagccaattctgtttctaaagtccattttgtttttaccccattcacatgaagattattttaaaagaattcataagtgaatcctgagggcaaagttagagataggacagaggcaagttgcttaaccaatatgggaattggattaaatgctctctaggccctccagttytaaagttctgtgagtctgatttttgacaccatgtaacaccatcacatatgtagtacaatacccaaagaacatcacaatgtatataaattgcactgtaggtaagatgatagaaacaaaaaattagatattcaatttgatcagtgtgataagtttatgataaaattatatgtaggaaatagcaagttcctgtaaatttattacagtattcaaaagtatagccagagttttaacaaacaaggcaatttttatagcattggccattaaatatgaaattgatttatatagttgtagtgactgcccaaaaataaccctttagtgagtgcttttctattattgatttaggtaaaaatctgatattgcttagagctacgctgtctgatatggtagcccctacccatgtttggctgtttatattaattaattaaaattaaaaattcagttcctcagtaacactattcttcacayttcaggtgctcaatagccacatgtagccaggtgttgctgtattggacagcacaggtatagaacatttccatcaacacggaaagttctattggacagtactggtatagagactcttgttgggaagaactggatatgtgctaagcaagagggctttatttcacccagaaaatctttcggtttattcagatgttggaaaactaatgtacagattccacaactcattctggctgattctctgagcagcattctgartaaagtcttctacatccaatcccaacaaatccaacaaaggatcactcaaggccaggagtgcaagaccatccagggcaacataacaagactctgtctctataattaaaaaaaaaaaaaagctgtaatcccagcactttgggagaccaaggcaggtggattcttgagcacaggagtttgaggccagcctggrcaacatggtgaagtcctgtctctacaaaaaaatacaaaaagccgggtatagtggcacacacctgtagtcccagctacttgggagcttgaggcgggaggatcgctagagcctgggaagtgcagattggagtgagccgtgatcgcaccactgcactccagcctggcaacagagtgagaccctgtctcaaaaaaaaaaaaaaaaaaagaaaaagtaacccaactgatatcttatctttgattttattaggcttccagacagttccagtccattctgcaagagaggcaatcactccctgcttgggaagaaagagaaaccattcttaacttattgcgtaagcaccaggtggttgtcataagtggtatgactgggtaagaatgcagtttattcatctgtagctttcatctataaatattatatgcaccctggttaccataaccagttgaacttgttaaaaactgtagctggatttatagatattatatacatctgccttgagacataaggcaaaaaaatccagctgaagacttttaacaaggctcatgtttaaatttaaaggatagttctagaacatttagcttgagagctttttatcttctgaatttattctgatttcctgtcacccaggctggagtgcagtggcatgatctcggctcactgcaacctttgcctcctgggttcaagtgattctcatgcctcagccatccgagtagctgagatgacaggcgcaccactgtggtgcaccaccatacccaactaatttttgtgtgtttttagtagagaggggtgttttaccatgttggccaggctggtctcgaactcctggcctcaagtgatccgcctgcctcggtctcccaaagtgctgggattacaggtgtgagtcaccacacccagcctttatttttcttttaaaaacaacttaattatggtgcgttatttttcctgctttacattctcctatttagcagggacaaattgcagacttcatttatttattcaagagtatacaatttaataattatatttgtgtccagactcagtgatatggtaataattcgtaccttctagtttatctttttaacctcagcctaatcatagctaaattaatacctataaaatattttgataatcataagctaatactccttttctttggggttcatgtgtagagtttacgttcctagaagcatttacagaccttaatttaatgtctgttcaatagtcccaattttacaaatgttactaaactattatttgattggagtgcaaattcctagaatttcccacctcttggtaataagtcaggaggttgttttagaaaatacctgaaactgaacaacttttattctaattagctttatcacttttctcattccatatgattgcttctttagttaactagcccttgaaaacttcattttaggacttatttgttttaatgtacagatgtgggaaaaccacacaaattccgcagtttattctggatgattctctgartggaccacctgagaaggtagccaacatcatctgtacccaaccccgacgaatctctgcaatctctgttgctgaacgcgttgctaaagaaagagcagagagggtgggtctgaccgtgggataccagattcggttagaaagtgtcaaggtttgtatgctctgcttatttcctggtaacagaaatttatggtttttaggtataaaaagttttgggggttaggagattcatgggcaatttgggatatatactttcaggttatttttaaattaatgattacctttggtaatcatttatttaaatatttagaaatatttagaaatattttggtataagaactcttatggccaggcgckgtggctcacacctgtaatcccagcactttgagaggccaaggcaggtggatcacctgaggtcgggagttcgagaccagcctgaccaacatggagaaaccccatctctactaaaaatacaaaaattagccragtgtggtggcacacgcctgtaatcccagctactcgggagtctgaggcaggagaatcccttgaacctgggagacggaagttgcaatgagccgagattgcgccattgcactccagcctgggcaaaaagagsaaaattctgtctcaaaaaaaaaaaaaacaaaaaaaactcttatttggttgtactaaatttcctctgtaaagctttttattttttattggcagaagtcatctagtaaagactgttttgctcttgaacttgggacataatccatttaaccaaataaggagcagacagattgagaactgttttcattattcactgttttttaatgctttttatgaaaatcttaacattgtgatatgaagtagaaaggcttttattactgtccctggcaagaaactatgtttagtatggtttcctattaaatggaactgctggtgtttccaatattttttatcactatccattcaaaatggctttccagtaatgtttcctttttttgaaaattttattaatgatttatattgccctttcatgtgtaagtcctcagccaccagactgttatactgcaccacgggagtgctgctgagaaggctagaaggagatacagctctacaaggagtttcccatatcattgttgatgaagttcatgagaggacagaagaaaggtaaaacaaagactttcccagggaacacacactcacctgaattgaaggcatggcagaaaaaattgttttctagttccaattcagtttcatgcagctagtaatggtaatttgccacaaggaaggcctatgttagagaagagcaactgctttcttgatctccagggtctgtaacactaaaaaggacagcacatgctcatcacttattagatggagtcatcctgttaggttagaaggtatacttcacaccatcctgggcattatgctaagttgaataccgtacttagtagaaataacagatgtcatgcatgctgtggctgaatgtatcttcttccttgtttatttggccattcagtcctgacattgattcatgtatttattgagcctgcattaaatgccaagtgatatattagttgctggggatacagtgatgaacaagcatgtatggctccccctcatctcttacagtccagtagaaaaaacaaataatgaacaagtaaacaagcaaatgattgtaaattggaataagcactatgaaggaataaacggcatgctgtgtttggagggagagacccatagatgctcaaagatcatatctctgtaagatgacaatttaaattcaaaactgaagtatggccgggcgcaatggctcacacccataatccctgcactttgggaggccaaggtgggaggatcgcttgagctcaggagttggagccccacctgggcaacatagtgagaccatgtttccacgaaaagtaaaaaaaacaaaacaaaacaaaaaatagccagtagtcattctactggggatacagaaaaaaaaaaaaaaaattagccaggcgtgatgcctcacacctaaggtcccagctactcaggaggctgaggcaggagaatcaattgagcccccaggaggttgaggctgcagtgagctgtgatagcaccactgcactccaccctggtcaagaaagcaagaccctgtctcraaagaaaagaaaagaaaagaaaagaaaagaaaagaaaagaaaagaaaactgaaatatgagaaggaatcccaggtgacaaacgggggtaaggaaagtatgtttgaagattttgcagtgggaaggggctttgtgagtccagaaacaaggaagcccagtgcacctgctgtgtagcagcaaaggggaaagtagcacagggaagaagcagcaggagccagaccttccagggccttaagcaccacgaataataaagcatgtggattttatcttatgaaattagaagtcattaaagggtgaggcataaaataaaaattcttgccagacacagtggtgcatgcttgtagttccagctactgaggaggctgaggcaggaggattgcttaagttcaggagtgcaaggctgtggtgtgctatgattgcacctgtgaagagccacttcagcctgggaaatatcatgagactccatctctaaaaaaaaaaaaaaaaaaaattaaaagtctgaatattttaagtactgaggagggccaggaagatggatggcattaatcatagtttgtcatgtggatcatgccctagagcagtaaaagaaaactagtgggaaaaaagagaaagtcctgtgaaaattatgaagttttcccacaaagtattgtaccacaataaatatcttgagaagaagaaaaaaagtctaagtaaacttggtggactgataggaaagcagaaaatagctaaaagcaaaacattaaaaaaaaaaaaaaaaaaaggattggtggcaggcgcctgtagtcccagctactcgggaggctgaggcaggagaatcgcttgaacctgggaggcggaggttgccgtgagccgagattgcgccactgtactccaggctgggcgacagagcaagaaaaaaaaaaaaggaattgaacagagaaggcatataaccagaagaactattagaagaaataatacattactattrttagtaaataagaaatatgaagtaattagaaactaaagaaagacttttagataaaaagaatgaaccaaaagaaaaagaaataattcctagaacaagacaataataaatattaaattactatacagaaaacattggaaatctctaaggggcaaataatctttttgtagaaactccagaaaacaatgggaaaaaaaattaatggtaaataatgtcattttgccactgttggaaatgaacatctgaaagaagaaatttttttaacaaaatcattgaacaacttggaagaggaagccaaataaaacattctctcagattaatggtatttaaatgattgatttataaagataagtttaaacttttagggaaacctatatccagtataattttgaatatgaagagtagctttggattctataacatttgtacttccacaaacttgaagaaatgagaacatagcactggatttggttcctggctaaaataggagaaagatttttataaaacctaaggatctgtagaatatgaacgttaaaaattcaaaagatgttcacatctgaataaagattaattacacagtggagaagggtgcttcaaatatttacaaataccagtttacaagaaagggtatacaaattacaaggaaaagtaggggaatatttgctaactctgactgaaaaaagcaaaaactaataaaatctaggaacaaaaatcagtaaaaatattggcaagattaaaggttgaatatagaaaggtgacagttgtgttagtttgaaattttaataaattttctaatcacagagatgacatgatcattctaaggcatacagtaaataccaaaaaatgtaaaagaagaatctctgtcccttataaaattgctagttacatgttataattttagtctcttttcttctgggagtatattgggagttagaagagggatatggtagaaagagagatgtatttccacaaacactattgggattatatagttttgttgtgctgtttttgatttaacagaatgatagcatgagttaatgaattatctttttttttttttgaaacaaagtctttgtcatccaggctggagtgcagtggtgcagtctcagctcactgcagcctccacctcccaggttcaagcgatcctcctgcctcggcctcccaagtagccgcaactacaggtgcacgccaccaggcctggctaatttttctatttttttaatagagtcggagtttcaccatgttggccaggcttgtcttgaactcctgagctcaagtgatatgctcgccttggcctcccaaagtgctgggattacaggtgtaagccaccacacccagctgaattatctgtaaaattaagaatttcataaggaaattctgaagtctggatataccataaattacttaaccatttgcctgttgttgttggactatttcccttttccctgaaaaagaaacaaaaatagtcataaatgtaattaaattagctcattaaaaagagctaagtagtataagaatatgttttcattaaaaactcaaacaggccaggtgcagtggctcacacctacagaccttccattctgggattactgattatatgttcagtaatcccagcattttgggaagccaagacaagaggatcacttgagcccaggagtttgagaccagcctgggcaatatagggagacaccatctctactataaaaacaaaaacaaaaaaattagccccagctactcaggaggctgaggcaggaggatcacttgaacccagttcaaggctgcagtgagccatgataacgccactgcactccagcctgggtgacagagcgaaaccttgtctcaaaaaaaaaggtaagaaaaacgttatagataaagtgaaagtccctcttactactcccaaaccactctcagttcctttcttagaagtaaactggtagtacatctttctatgcatggatatagaygtttactttgttagaaatagttacttttgttttctgacctttttttcttacacagatgatatattcatttagtaagtcaatgaatattcattgagtacttactatgtcccaggcattgttgtagatcctgcagtagtgaataaaattcttgtccttgtagaacttctattctagtgggagagctcatcaataagcaagataaataagtaaaatacagaatatggtaagtgctaagaagaaaaaataaagcagaaaaaagacaatagaaattcaagggaggagggcatttgaaattttaaataaggtagccaaggaagtcctcactgaaaaactatctttggagtaaggacttgaaggaagtgagggagctacctgtgtgaagggctaggagaagcccagtaatccaggcagattaataacatgtacaaaagacccaaggtgcatgcctcaaagacggcaaggagaacagtgagccggtgctgagtgaatgaacgggagagtactagaaaaagatggggagcatggggtgtagaccgtgccatatagagccttgttagtaagaattctaatgagaagtcattggattttaagcagaagagtggcacaatcagatttttctttttttttttaagagatggggtcttgctatatcggctaggttggtcttgaactcctggcctcaagcattcctcccacctcagcctcccaaactgctaggattacaagtgtgagccaccgcaccccgtcagcacaatcagactgacattcgaagagcattattggttggctgtattgagaacagattgcaagggggcaagggccaagagaccaattagggtggtgttattctgccgtgcatactattccaggcaacttgggatttttcctactaaaaatatgtcttagagatgttttcatgttattttctagagctctaccttattccttgtatctgcttcatgttatttcatagactggatgatattgttataattaaccatttatcagttagttgatggacatttgggtagtttctactgtcttactattacaaacaatgctataatgaaaatctttgtatgtgcctctttgtggtacacatagatatcaagaagtagaattatcaaatttgtaccctataccagctaagagtaaaaaaataataattataaaatttgattatcaatcctgttgggattttgattggtactgcctggatttggtttctttgggaaagaatttatatctttatacaggttgagcatccctaatccaaaaatcagaaataatccaaaatctgaaacttcttgagtgctgacatgacactacaagtggtaagattccacacctgacacctttgctctccgatggttcaatgtataccaactttatttcacagacaaaattattcaaaatattatatacagttacctttaggctgtgtatataaggtatatatgaaacataaattgatttcttgtttagatttagaccccatcccccagatatctcattatgtatatgcaactattctaaaatctgagaaaatttgaaatctgaaacacttctggttccaagcatttcacataacagatattcaacctgtaatagtaaggcttcacatccaagaacaggacatattgttctatgaacgttaatggtttttttttttcacagagatcttacacatttcttgctcaaaatatagtaaaagttactaattttcatgtgttgaatttgtttgatcctcaggtgtttcttttattttctctagtgacttcttgctgctagttttgaaggacattgtatcgcagaggccaggtcttcaagttattttaatgagtgcaactctaaacgctgagcttttttcagactattttaattcctgccccgttattactataccaggtgaataaaatgcatcattaaatatgtatcattctaataagcaaatataattatkttaaagtttgagacataagtagatatttatacctctttctagagaagcgattcatttataacataaaatcataaaccatataatgcagctgataaggaggtaacatatcttgctgggagatttttttttttgagacagagtctcgctctgtcacccaggctggagtgcagtggcgtgatctcggctcactgcaacctctgcctcccgggttcatgccattctcctgcctcagcctcccgagtagctgggactacaggcgcccgccacctcacccagctaattttttgtatttttagtagagacggggtttcactgtgttagccaggatggtctccatctcctgacctcacgatctgcccgcctcggcctcccaaagtgctgggattacaggtgtgagccactgcacccggccattgctgggagattttaatttttttaggggacttttaaaaaaagtcatagttacttatttctagcattycattgtgtttaacatcaaagttgatagtggcagtctgtcataaagagggaacttgtgtctgtgacagtatatttgttcatttctggattctgctaaatttctgggtgttggtccactctggcagaaagtgacattggacagtctgtgttttctttgggcacttccacagtctcattgtggaattaatttatcaccctgagctttgatttatccttcttcaattgaatactaaaaagacactttggaaacactgactgataaaaaatagtgcagtttgttttagttatagggaatgctggcagtaaatctaaggaagaaactttgtgtttgatctagaatacaactgttgaatgtttaaaggtcctctatggtggaagtggcgggggcaggggaggagggtatgaaaggtgtaacaggtaaaagaaaaaaagtcttagcaaaggatcatttctctacctatacactgcttctgtttactgactgaaatctgccctttccaatttctgttaccagaacttttcttcttgatacttttaagaccacagaacaaataggacgttagcatgacaagctttaagagaattttatatatataaactatttcaagatggttgaatgggtgttctcaggctttctattttgtctccttgtttttctaggtcgtacatttcctgttgatcaattttttttggaagatgcaattgctgtgacaaggtaaggaagatattaattaagattcagtgaaaggacctggcatggtggttcatccctgtaattctagcactttggaaggcaaaggtgggaggatcttttggggccagttcaagaccagcttgggcaacatattgggacccccatctattgagaaaaaaaaaaagattcagtgaaactttgaaaacagaataatatttgaccctcaatgtgccagaatactaatacatgtgttagtctttttttctaatttttctgcacttgatttcagccaaaaagccaagaagtgattttcttctattttttctgtttgaacattttgttctcccctctctttcagcaaacagactgccaatatttaagtccctctacttactttttctttctttctttttttttttttttgagatagagtcttactctgttgcccaggctggtgtgcagtggtgtaatcatagctcactgcagcctcgaatacctggctcaagcagtccttctacttcagcctcctgagtagctgaactacagacacacacccccatgcctaattttttttaatggttttgtagagacgggtctcattatgttgcccaggctggtctcaaactcctgacctcaagcagtcctcctgccttgcctcccgaagtgctgggattacagtcatgagccaccatgcctggccccctctacttactataactttggcaagtagcttaatctctctgtactttagttttaatgaatttatacttgctgattctgctgagagcattaaaaaattaatgaattaatacttgcaaagtgcttagaactgtgcttggcacataatgcatgctctcaaaygttagcagttattggctgggtgtggtagctcacacctgtaatcccagcactttgggaggccgaggcgagcagatcacctgagggcgggagttcaagaccagcttggccaatatggtgaaaccctgtctctactacgaatacaaaagttagctgggcatggtggtgcatgcctgtaatgccagccaatctggaggctgaggcaggagaatcgcttgaacctggaaggcagaggttgcagtgagctgagaccacgccattgcactccagcctgggcggcagagtaaaactctgtctcaaaaaaaaaaaaaaaaaagttagctattattatcatcatcatcattgtactcgcatagagtttgcagtatagcctgagtgttaagatatctgtataaacaattgtaagtgctaggtagaaaatgttaatgtgtattgcatataaacagatctctcttctttgaaagccctactttctcttcttagtctctgatcttgaggattccgcaagattttccttgcactgtttcttctcactattaactctcccttggctaccttagactcatgtgatttcagctgtcatccctgtgccgagaactcccagattagtatcttcattcctgacctctgagctctagaatgaaacacccctaatatctgacagcttaaatacaagtcagaatttttctccttctctgttccttccttctctaataagcccccctcctaattccatattcatttaatggtactatattctcaaggtaaaaacccaaaaccagtggctctcaaattttaatgtgcaataaggatacttagggagcttattagaattattattttctgggccctatcccactaccattgaatatgagtttctgaggaaatcatctttcaactagtttacctgtctttactttttcaaactcactgcttccagaatatatatatatatgggtttttttttgtttgttttttgtttttttttaagacagcctcactctgtcacccaggctgagtgcagtggtgctatcatagatcactgcagccttgttcttccaggcccaagtgatcctgttacctcagaatactaagtagctgggactacagatgtgtgccaccatgcctggctaatttttttatttttagtagagacaaggtctcactatgttgcccaggctcagaattatctttaaacatagaattgttcacattcctcctattcttagaaattttcattggttccctatcactcacactttgtggacactaaaggcccatatcatctgaccccagccaatatttaagttcccttccttctttagtttcctacctataaaaccttagcactctcagactacttgttatttctgaaagatgccatactattactatctgtatttctttttcccacttccttctctagtcattctttaacacccaacttgaatgctacctccatgaaatttcctattttctgctattaaaaattaatcatttctttattagaagtcacagaatacttttcttgtgcctctaataacatttatttctgtcttacagtatagtgtgttgttttgttctgttctcactagtttgtaagctccttgaaagtatacttatttttctataccataccaccaccgtcaccatagtcccttgtccaaaataggcattcagtaaatattcaataaacaaacaaacggtgaatgtgaaaagagtgttggcatttaatggagagaaggggttggaggaagtcaggattatagaatcataggtttttaaatcttttttttaaaaagctacaatatactttatgcaaatgaaatcttataggaaatcatagagaaatgaaacataaaacaagaatgattgggctgaaagaatagcccccagttacttactttgctcccattcccttacctttccttggggctttgagcaacatttaaggctccagggaaaaaaaatcgagccacttacctatgccaatttcccaaaacatgagaaagtaaagccttttgaaattgacttgttagaagtctcatggcagattggtttagtggcagacagaactcaaatccagagcttttgtttccaaatctattcatttttctgctttgccatgatgtctaataggattgtcactaacaaatattaaactatccagttgtaagagttttgaaatgttttaagaatagtcttaggttgatgttcagccaacagctagaaacttgggtccaaatttgattgcaacaaaaggaaatcagctgcctgggaattatcatagaaacaagaggatcaataagattgctgaagaaaaatcaaaaatgaagaggggtgttactaaggctataactcaaatgtgttttctgaatgtccatgccattattcctggatagagcttttctccaaattcttagctggtctccgagacagacctaaaagcattgcagtgtgttcccaaccagaaatagggtacagccagaatcctggactggtggaaggatggcatgtgaattgggcagacagtgacattttgctgaacgagcacgtgaaacaggtgaattctttccctcctcaccaacaggaccacatacacacaaccacattcctttgtctttctcaggtatgtattacaggatgggagcccatatatgcggtccatgaaacagatttcaaaggaaaagcttaaagcaaggcggaacagaactgcatttgaagaagtggaagaagacctaaggctctcccttcacctccaggatcaggattctgtcaaagatgcagtgccagatcaacagttagattttaagcagctcctggcccgctataaaggtaacatgcctcttgggggaatattataattatgccaaagatttctagtattctttcttaccaagattcggaagaagaaaaatatgattcytgtttcatagttacattgcctttaattcatcagagcaaccttaaacctagaaaaatagttcagatacatatttagaatacaattgttactatatttgccaatgggttttttttctaattataaaagaaatatgtgctcattagagaaaaattgtgaggtagtaaaatataagttatattcttgtgcattttgtagctttttattttgatgtgatttcaaatttatggaaaagttcgcaaggctaaacgatgaactctcatatatcctttaccccaattcaccagttgttaatgtttacttcattttttgctttatcatttgctctgggttcatgtattttttttttctgaatctcctgagagtaagttacagatatgatgctcctttacccttaatactttagtgtgtctttcctaagaacaaggacattctcttacataaccacagtacagtgatcaaaatgaggacatttaacactgatacaattatataattcacagtccatactcaggcttgaacaattatctcagtaatgtttatttttgctgtattttcctgattcaggatcctatcatggatcatatattacattcagtcatgtattcttagtctcctttgatctagaacagctcctcatcctttgtcttttagtgaccttgacatttttgaagattattttgtagaatgtccatccatttgggtttagtatttctccatgattaaatttaggttatacatttttggctggagcatcacaaaaacgatcttgatttctcaatgcatcatatcaaaaggcacatgggccccgtggtgttggcttgtcccattattggcaatgttaacttgttcacttggtaaaggtaatgtttgctaggtttctcccttggtaattgctatttcttttgtagttaataagtcatttgtgaagcaatatttgacatgattttaaaaccatttaatatcccaatagttttagcattattcgtgggcttttaaaataacatcttttgaggcctaccctgtgctgagctttttatgtatgttattaggtacttcctcctcccatgccagactctagctggctactctttgttcctatgtggtcttctatccatataagctaaactgagcccatagaaaccccaggatcactacttttgctttcttccttgaagcctagactacaagcaggtctcagctgtccttcttgctcctttttccgtagactgtcaccctgttcttagttcttcccaaaaaagggtgtttattgttcatgagtaagagcttccaacccgttactgcttctgtaggatacaaggcaaatgaattttcctttttctgcatctaccaaagacagttcccaatcctggatgtggaatggtaatcaccaaggaattaagatattagccattattctgttgtttaggaagataagcatagctccctaacattttatttcatcttcgcaatattgagagatgtaaagctaagagaatggacttgtgttttatagatctgggttcaactcccaaggctctcataaaaccagctaatgatcttgagcaagttctttatcatctctgtgcctcagtttccttatctataaagtggaatcatttagatgagtataatacaaacccacaaggatagtgcccagctagtaagtrcagatccatgattctaattaaaatatgtctaactaaaaaatttgtgtgctttttgtacgtcataccaactgataattcagattcccttattccattaaattatggaacaagaaaattcctttgaggttgggcatggtgrctcacgcctataatcccaacactttgggaggctgaggcaggaggatcacatgagcccaggagttcaagaccagcctgggcaatayattgagaccttgtctctactacaaatgttttttaaaattagccgggcatggtagttggcacctgtagtcccagctactcaggaggctgaggcgggaggattgcttgagcaaagggattcaaggttgcagtgagctatgatcgcactagtgcactccagccccaacagagcaagaccttgtctcaaaaaaaagaaaatccctttggcttctttcaaaattttggagttttcttttaaaattatcactgaatctaatccatgactttctaattttaagcacaaaggttactaaagttcagaaagtacctttgggaccccctttttaaggaaggagaatggaggagttgaggtcaggaaacatgactctgccaccagcttctgtatggtactgggctgattgcttagcttttctgagcttctggttctgttttttgtttgtttgtttgttttaaaaaaaacaaaagtccttacaaaaattagccaggtgtggtggcacacacctgtagtcccaactatttgggaggttgaggaatgagaatcgcttgaacccaggaggcggaggctacagtgagcccagattgcaccactgcactccagcctgggcaacagagcaagactccatctcaaaaaaaaaaaaaatgccttgaatttgttgatctcaatgttctctttcgcctttcagaaaattaaataatgtttcctagctcaatttttaaggcattttctagtttttctttgaaaaaattaatgatcagtcatttaaaatatattattgatttggctgggcacagtggctmatgcctataatcccagcactttgagcggctgaggccagaggattgcttgagcccaggagttcaagaccagcctgggcaacatggtgctgccttgtctcttaaaaaaatttttaaattagctggtgtggtggtgtgcacctatagtccctgctactcaggaggctgaggtgagagatcatttgaaccccaagggccaaggctgcagtaagccatgatcacgccactgcactccagcctgaggagaagagtgagaccctgtctcaataataataattttaaaaaacaaaactatgttcagttttcttttttcaattagctgatcctttcttctttttgaaaagtctggctttttggaatcttggcaaagaaaagtgattctgctccacctttctcacccaaccacacccttgtttgtgcagcctgttgcttcctttttttcatttttgaccaacatggtattcattctaccagaacaacattgtttcaaaactccttttttttttttttgagacggagtcttgctctgtcgcccagcaggagtgcagtagcgcgatctcagcttaccacaacctccgcctcctgggttcaagcgaatctcctgcctcagcctcccaagtagctgggattacaggcacccaccaccatgcctggctaatttttttttttttgtatttttagtagagatggggatttcccatattggtcaggctggtctcaaactcttgacctcaggtgatccacccatctcggcctcccaaagtgctgggattacaggcatgagccaccgcgcccagccgaaactgcttttgtccctcttcaaacttctcagcatcatataggaagtttcccttccttggtaccaactatagttattttgttccagttagactgtagttagggcgataggtcattaggagagcctgagaagaatgggcagcagtctttgaagagttagtcaccccaacaatatactattgcttttaaaagagctgaggtggccgggcgcggtggctcacgactataatctcagcagtttgggaggccgaggcgggtggatcacgaggttaggagttcgagaccagcctgaccaacatggtgaaaccccatctctactaaaaatacaaaaattagctggccgtggtactacgtgcctgtaatcccagctactcaggaggctgaggcaggagaatcgcttgaatccgggaggtggaggttgcagtgagccgagatcacaccactgcactccagcctgggtgacagagcaagactctgtctcaaaaataaaataaaataaaaaaataaaagagccgaggcttgtagtacatcctatagaactacatcgtttaccagatcgcagatagattaggagattgtgagtggggagattgtgagggtctatgagtagactccgtgggtgttaatgaagatattacaatcacatttatttttcagggaagatcaaccacttatcattttctcaaaggaacctaaaggttcagcgagtcactgttataaaaatgctggtgaaagctggggtctctgtccattgattgccataggttagtgttacctggacttccagcatatctcattcatgattcgattgaatctagaagaagtttctaaaatgtatttgackttgaattttgtttccagaacttaagctttcaataaatatttgaagggtaaaagaggggaaggaatgaggagagtaaaaagtggcccatctgggtctttccaacaggggcaggagcctgctttttgggtcattgttcaagcaaaaattacttctgatgaggctggattttctgggaaactaaaagaaaaaagtgggctggttgtggtggctgtaatcccagcactttgggaggctgaggcaggaggactgccttagccygggagttcgagascagcctgggcaacacagcaagaccccatgtctacaaaaaataaaattaaattaaccaggtatggtggtgcatgcctgcagtcccagcctctcaggaggctgagatcggaggatcacttgagcctgggaggtcgaggctgcagtgagctgtgatcacaccactgcattccagcctgggtgacagagcaagaccctgtctctaaataaagaaaagaaaaaagttcatttcagtacattaaatgttaatatctgtgctattaaaccaacactcacctaattcacaggcatattgtatatggtataaatatacaataaaatacatcaacaaggtataaatatccttctcatttttacctttctttctttcaggggttagcaagtcagtcatcaaaacaatgtccatcatggattttgaaaaggtgaatcttgaattaatagaggccttattagagtggattgtggatggaaagcactcctaccctccaggtaactgcttctttattaaggcttgaatgacaattgaaacacttagtccttggctaaatgggagtctattcatgagtgcttgaattacmtgcagactctgcacacaggctacaaggcagtggggttaagaatacaggctttgcagtctgataaacttcccagctctgctattcaggaatcttgaaaccttgaataaagtctttatctttttttttttttttttttttttttttttgagacggggttttgctcttgttgcccaggctggagtgcaatggcgtgaccttagcttactgcaatctccgcctcccgggttcaagcgattctcctgcctcagcctcctgagtagctgggattacaagcatgtgccaccacacctggctaattttgtattttttagtagagacaggttttctccctgttggccaggctggtctcgaactcctgatctcaggtgatccgcctgcctcggcctcccaaagtgctgggattatwggcgtgagccaccgtgcccggcctagtcctatcttttctatgcttcaatttccttgttgtaaaatgaagacagtaataaatcctgttatgtaaaactattttggggattaaaagaaaccatatgtaagacacttagcacagtatagttaaggctcagtagatactacccctaatactgatgacattataattataataatacatgccaggtgcaatggctcacacttgtaatcccagcactttgagaggccaaggaaggtgaatcatttgagtccaggagtttgagatcagcctggaaaacatagtgaaaccccatctctacaaaaaagtgcaaaaattagtcaggcgtggtggcacatgcctgtagtcccagcaaggggttggagtgggaggattgccttagcctgagaggtggaagctgccatgagccatgatcgcaccactgcactccagcttaggcaacagagsaagaccctgtctcaaaaaaacagaaaaaaaccacacaccacattttgtatgtcatatgtattacatactgtattctcttttgtttctttctttttttttttttttttttgagacagggtctcactctcttgcccaggctggagtgtgcagtggcatgatgtcagctcactgtaacctcttcctcctgggttcaagcagtcctctggcctcagcttcccaagtagctgggactacaggtgtgcacctccacgcctggctaatttttgtatttttagtagagacagggttttgccatgttggccagtctggtcttgaactcctgacctcacatgatccacccaccttggcctcccaaagtgctgggattacaggcgtgagccactgcacctggtgtacatactgtattcttacagtaaagtaaactaaagaaaagaaaatgttatttaaaaagtcataaggaagagaaaatatatttactattcattaagtggaagcagattatcataaaggtcttcatctttgttgccttcacattcagtaggctgaggaggaggaagaggagggattcctcttgctgtctcgggtggcagaggtggaagaagtggaaggggaggcagaagaggcaggcacgctcattgcaacattaaggaaacatattgtaatttctgtctgactttgctctttcatttctctaaaaatgtttctatatagtaccaatccttcccctgtttgctttggtttcagtgctctatcatagaatggtccacgtcataatagaagttaaaagcagtcttgagtctttctgccagactgtctaatgtcaatgtgtttgctggcactgctgcttcttttacatcttcttcctcattgtctggcactggttcagaagcactcatctccatcaagtcatcttctgttaattcccctggtgtggtgttggctagctcttgaatttctccaagatccatatcttgaaatcattcaccactgccaccatctccccacctttattccatatccatagtctcttttatgattttctcacttgtcttataaatcctgtgaggtcatgcacatctggacacagctttgtccagcatcagtttatcgttttaggcttgatggctttcgcactttttcaataacaaccgtggcatcttcaatgaagtaatccttccagactttcatgatgttctctctatcagaattctctttsgtagcattgacagtcctttccatagagtacctgtataatgagccttaaaggtcctcatgaactccgcatatagaggctaaattagagacatatttagggaaaagtagatcacttcagtgtctttggtgttgaactcatggggttctgggtggccagtggcactgtccagtatgaaaagaactttggcaaggtgcttcctgattccagggacaaagcattgatggaaccagtccagaaaaggggttcccattggccagcctttcttgtacaaccagaacactggcagctggtgtttcttctttctgttcaaggccaggggttaactttatagacagggcagtgctgatcatgaacccaactacatttgcacaaaagagtagatttagcctatcccttcctgccttaaatcctggtactcacttctcttccttactaataaatgtcctttgtggcattttttttccagaagagggcgctttcatcagttatttggaaccttttcaggcagatacatttctcctcaatgattttcttaatggcatctgggaactcattatctgctgcctcttggtcagcagaagctgctgcttctgttatcttgatattttaaaagccaaacctctttctaaaattgtcaaactatcctttgctggcattaaatttcccagctttagatccttcccttccgtttgctttaagttgctttgctttttcttgactcatacaggtawgccttatagcaatcttgctcccacataaaaactgcattttcaatgagataaaaaggtatttctcaaaaagcgtaagattttcacacctgctggcatagctgcagtgacagcttcacaaatctctttttcttctttcacaatggcccttactctggattcatttatctggaaatggcaggcaaccacggttatagacctccatctgcggaacatattgagcaattcaccttttgcttgtgatgtcatgacttttctctgcttctcgggagtacttacagcatcactagtggcacttcgtatagccatgatgttattcaaggtttactgtattccactaaacacaatgaaaaatgcacaagaaccacagagatcactttttactataatatacaatattctgacaaaacaaatgacttacttggagatgattagtgtcacaatacatttttttaagtcgattctcacaacacttgagctcactgcagtagcaacaggaggtggctacaaaatcattttttaaataaagttattacagtagtatactgtattatatagttcattgtatgcagttttgatttaataccactttttttttttttttttttgagatggagttttgctcttgttgaccaggctggagtgcaatggtgtgatctcggctcaccgcaacctccgcttcccaggttcaagcaattctcctgcctcagcctcccaagtagctgggattacaggcatgcgccaccacacccggctaattttgtatttttttagtagagatggagtttcaccgtgttggtcaggctggtctcgaactcccaacctcaggtgatctacccacctcagcctcccaaagtgctgggattacaggcatgagccaccatgcccggcctgatttaatactgcatttttacatttgttcacatttctctagatgcaaatggcgccaggtatggtccataagtatgtgtgtgtgagttttgattattttaaccttttataataggtttgtgtgtattttatgatataaataataaaataggctagtatctatatatgtcttatgcattcatgacatatctctttcttaattttttttcatatttctaggctatgcagtttgtgtgctagtttttttcaaattgtcacaaatctccaaaaattttccaatatattcattgaaagaaaattgccaatgagtagacccatgcagtgcaaacctatgttgttcaaggatcaactgaacacttattatagttaaacactattactactactgtactaaacacagagcaatcactactttactcactgtcttcccatcccggtagccttcttaacctcacttgcagtcccttatccctagaatgaatactccaaatcttctcttaactaaatcctttattttcttcaggtttctcctcaatttacctctacagaccaccctatctgttgtcttgccccaatccccttactctatcctaatatctaaaaataggccgggtgctgtggctcacacctgtagtcccagcactttgggaggccgaggcaggcggatcacctgaggtcaggagttcgagaccagcctggccaacatggagaaacaccatctctactaaaaatacaaaaattagctgggcatggtggcgggtacctgtaatcccagctacacaggaggctgaggcaggagaatctcttgaacccaggaggcggaggttgcagtgagccaagatcgcgccaccgcactccagcctgggctacaagagcaagactccacctcaaaaaaaaataaaagaattcattttcattgtagcacttaacactgtctgaaattggagttttgcatacttcagtaggatataagctccttaagagtagagatttcggccaggcacagtggctyaccaccaagcaacaacagcaaaactccgtctcagaaaaaaaaaaaaaaaaaaaaagaatagacatttcttgttcaccactgtatttctcagaccctagaacagtgcctacagcatttaggtaccgagtaaatatttgttgcatgaataaatgaatgtaatgattaaatggaataatagatcaaaaaattactttatgttggttgggcatggtagctcatgcctgaaatgccagcactttgggaggccgaggtgggtggatcacctaaagtcaggagttcgagaccagcctagccaacatggcaaaaccccatctctactaaaaattagccagacatggtgatgggcacctgtaatcccagctacttgggaggctgaggcaggagagttgcttgaacccaggatgtggagattgcagtgaaccaagattgcgccacttcactccaacctgggtaacagagcaagactctgtctctaaaaaaaaaaaaatatatatatatatattaatctatgtgatcataaagaacttaagagaaatgagaatggctgctctcttctgcttacactttaatcattatgtggttttcttttcttttttttgagacagagtctctgtcacccaggcaatggaggtgcagtggcgcaatctcggctctgcaacttccgcctcctgggttcaagcaattgtcctgcctcagcctcccgtgtagctgggactacaggcatgtgccaccacacccagctaatttttgtatttttagtagagacggggtttcacagtgttggccaagctggtattgaattcctgactcagatgatctgcccgtgttggcctcccatagtgctgggactacaggcgtgagccactgcacccggcccgctgtgtggttgtctaaagagacttgtgagccatataaaattatttaaatgccttatttttacttggcaagtagtgagtgttggctaatacagtatcacttcactggactgtatatcttgtttctttttcgtgtgtgtgtgacagtcttgctctgtcgcccaggctggagtgcagtggtgggatctcagctcactgcaacctctgcctcccaggttgaagcaattctcctatctcagcctcctgagtaactgggactacaggtgtgcaccaccatgtcccccagctaatttttgtaatttttttttttttttttgagatgaagtctcactctggagtgcgatggtgtgatctcagctcactgcaacctccgcctcccgggttcaagtgattctcctgcctcagcctcccgagtagctgggattacaggtgcacgccaccatgcccggctaatttttttgtttttttagtagagacagggtttcactatgttggccaggctggtctggaactcctgacctcaggtgatccgcccgctttggcctcccaaagtgctgggattacaggcgtgagccaccatgcccagcctatgtcatttcattccaaaggagaagactattactgaaaaaaatcaagcatagcaaaaaaatcagaaatgaagaagaaatgttagaaaattacctaaattttgtaatcccagctagtcgggaggctgaggcaggagaatcgcttgaacccaggaggcagaggttgcagcaagccaaaatccctccattgcactccagcctggcagcctgggggacaagagcgagacttcgtctcaaaaaaaaaaaaaaagaaataaagaaagaaaattacctaaatttaaagcagagttgatatagtgactaggaagtcagtgacatatgtgacatatctgtgaacattaaagatatcccagacagatgaggcacataaaaatatagacaaaaattttttcaatccatatataatagtatgtttcatcgttgtttaatgttgtggctttttttttcctttgtatttttctttttgcttatcttttaataaataatttttttaatttttctttttgagacagagtttcactttgtcactcaggctagagtgcagtggcatgatcacgggtcactgcagccccaacttcctggcttaagcaatcctacaacctccctcagcctctcgagccctactaaatttttaattttttgtagagatggtgtctcccttgtgttgyccagactggtttcaaactcctaggctcaagcagtcttcccacttcagcctctcaaagtgctgtaattacaggcatgaaccaccacacctgacctcaataaaattttgtggcattttagcagaggatcatggggtatgtaatggaaagaacatggatctgatgccagaaaccctaggtttgtgtccaagctccatgcttactaactctgtgacctgagtctgaagttactgagtcactagtaggggtactagtagccttcttttttttttttttattgagacggagtctcactctgtggcccagggtgaagtgcaatggcatggtctcggctcactgcaacctccacttcctgggttcaagtgattctcgtgcctccagcctcccaagtagctgggattacaggcatgcaccaccatgccaggctaatttttgtatttttagtagagatggggtttcaccatgttggtcaggctagtcttgaactcttgacctcaggtgatccacccacctcagcctcctaaagtgctgggattacaggcctgagccaccatgcctggccactaataaccttctcaatggatggctatgaggattaaatgggataatatatgtgaacattctttgttactgtgaggtattttttaaaatgctataagatctctttcagccttcatcagagttccagttttgtggtaattcagattcctcatttatttagtgggaaggataactatgactgaataataggtcatgagttctctgctgacagatgcttgttttatatcccattgcacttcacatggagctgacataggcacccaataaatatttgtgggattaaaggggggctggtgaaaacagtaccatttttctccctgaataaagcacaaaagaaggtgactattgctgagtgactgctcttcacgcagaaatatactataatcagttttcatgcttattttatttaatgtaaaatttaaaagcccataaactgttaacatgatatgattagttaatgggctgtctctaaaatatatctgaatttagattaccagattggccagtcaattatagtttctttttctcatttccagtaaaatgtttatggattttatttattaataaaatwgtcttcctgtcttataaggttaggagaataactcttcctatagaaatagaatgtcaaggtcaggtgtggtggtgcatgcctgtagtcccaactactcgggaggctaaagcagaaagattgcttgggctcaagagttcaagaccatccttggcagtatagtgagacctcatctctaaaaaaataaaaaaatagaaagttgccagtggggccaagcgcagtggctcatgcctgtaatcccagcacttttggaggccaaggcgggcagatcacgaggtcaggagttcgagaccagcctgaccaacatggtgaaacctgtctctactaaaactacaaaaattagctggcgtgcgcctgtaatcccagctactcaggaggatgaggcgggagaatcaattgaacccaggaggtggaggttgtagtgagctgagatcacatcattgcacttcagcctgggcaacagagcaagacactgtctccaaaaaaaaaaaaaaaatagccagtgtactgaaaaagtttatttatagagcttagctaggccaggcacagtggctcatgcctgtaatcccagcattttggtaggctgaggcgggtggatcacttgagtccaggagtttgagaccagcctgggcaacatggcgaaaccccatctctgctaaaaatataaaaaattagccgggcgtgatggcatgtacctgtagtcccaactactcaggaggctaaggtaggaaaatcacctgagcctggggaggttgaggctgcagtgagccgtgatcgcgcaactgcacttcagcctgggtgacagagcaaggccttgtctcaaaaaataaaaattaaaataaaaaaagagcttagctaataattcttggcattataccgacagacattatacttttccacacctcagtttttctggttatagaaagataaatctccattttgtccttattaagtcagagaatatataaaacatgtagttatttatttgtttaaatcctctgggactttacaaagaaaataaaactgatagtgaaaatttctctttttttttttttttgagaaagggtcttgctctgttgcccaggctagagtgcagtggcacaatcttggcttaccgcaaactccgcctccctggctcaagcaaccctcctacctcagcctgccgagtagctgagaccacaggcgaaattctcagattattgcatattttggttaaaaacagctttataatctatattagtttttcatttacttcatttatcatattcttttttaaaaaaatttttcttgtttcttttctgtgcctatgcttacccacatattgattctttttatatacccaggtgctatacttgtatttttaccaggactagcagaaatcaaaatgctttatgaacagctacagtctaattctcttttcaacaacagacgtagtaatcggtaagctaattgctttctatattcttaatcatccattgcagttacctctaaagatatcatcaccctctttagaccctggaagagcaccagtcttcgagcatacatttgtttatgccagctggaaatgagcaaacctatttgctgcaggaaatcagttattccctttttattaaagaaaaatattggccaggctcagtggctcatgcctgtaatcccagcwctttgggaggccgaggcgggcggatcacctgaggtcaggagttggagaccagcctgaccaacgtggagaaacctcatctctactaaaaatacaaaattagctgggtgtggtggccggcacctataaacccagctactcaagaggctgaggcaggagaatagcttgaacccgggaggcagaggttttggtgagctgagatcacaccattgcgctccagcccgggcaacaagagtgaaactccgtttcaaaaaaattctcttcacttagcatagtgactcagcaaatttgcatgtaattttagatgtcagagccccagatagtgggggaaggtgggggaaaggcagcattagtaacaacaaagaagtcctaccattatgagagaaaatcatcttcaatagttcctattccaggagcaagacacactgggtgtgtcttcatttttaaggggaaaactatttgacaaacgaacactcccttaaaatgtaagaatgaagtttctgaggttacatcattgtcattgcctgtcttctctgtgtgtgtgtatgtatgtgtgtgtgtatgtatgtgtatatatatgtatgtatatatatatatatatatattttttttttttttttttttttttttgagacagagtctcgctctgtggcccaggctggagtgcagtggcgtgatctcggctcactgcaacctccgcctcccaggttcaagtgattcttctgcctcagcctcacaagtagctggggttacaggctcatcttgtatttaaaggaagaataattctttgctggttagtttgcactaggcttgttggttgtagaatatcaattatttattcctcttcattatttactactgaattacactccaacatttttcccaagttggtatgaggtttttggttcctagaactaagtaaatattttgtaaaaatcagaaaggactttaccttttattttattttattttattttattttatttttcgagacggagtctcactattgtcgcccaagctgaagtgcaatggcaggatgtcagctcactgcaacctctgcatcctgggctcaagtgattcacctgcctcagcttcccgagtaactgggattacaggtgcccaccaacacacctggttaatttttgtatttttagtagagacgaggtttcaccatgttggctaggctgatctcaaactcctgacctcgggtgatcygcctgcctcagccttccaaagtgctgggattacaggtgtgagccaccgtacccggccaagactttactatgtagaagagctgagctctgaggacaggttgtggagaagttgctaatacctgaagtcatattgttggttttagtagaaattcacctactgtaatctagtttcggtgctaggtgctagaatacttcatgtgcttttatttccttccagatgtgttattcacccacttcattcatctttatccagtgaagagcagcaggctgtgtttgtaaaacctcctgcaggagtaactaagattataatttccaccaacattgctgagacatccataaccatcgatgatgttgtctatgttatcgattctgggaaaatgaaagaaaagaggtattccgtcttgtggtgatgtaagagaggggctaaaaatgcttcatttagggagacacygttgttagtggctaatgctattaagctacacggattactgtatgaaaaaatastttgtgaaaactgtacgtggatgtgtgaatgattgtgtagccaggaccatggaccttaacatcaaatggggatgaaaagtaatgaattgctttttctctctttttgtcatgtgattttatatgtgcttgtatgaaaaggggttgaataaagaaactgtgtagtttgggaaactctgcacttgatgccacttaaatcagcactagctgctcctaccaggggctcaactatcccagaatatacagggcactgtgtccctctacaggaggaagctggttcatctattctgtccatagcaagcagtcttggccatgtttttataaaatgactcaatttatattttctttttctttatagatatgatgccagcaaagggatggaaagtctagaggacacctttgtatctcaagctaatgctctacaaaggaaaggccgagcaggccgtgttgcatctggggtctgcttccatttattcactagccatcactacaatcaccagcttttaaaacaacagctaccagaaatacaaagagtgccattggaacagctgtgtctaaggtgacatctggttttttgtgttttgcttccaaaaggtctaaatgtttctcactctattaagttccatgttttccttttacttctagaagatatttggctaagaatgaccaccaataatctcatttatttgtgaagaaagatatccttagtgttgcctttaccattccttttaaatttctgcacataaagatctcttacattgcagagcatggccctaaaacagagcttaagagtacatatgtagggccgggcatggaggctcatgcttataatcccagcactttgggagactgaggcaggtggatcacctgaggtcaggagttcgagaccagcttggccaacatagcaaaactccatctctactaaaaatacaaaaattatctgtgtgtgatagcacacacctgtaatcccagctacttgggaggctgaggaaggagaatctcttgaacccaggaggcagaggttgcagtgggctgagatcgtgccactgcactccagcctgggcaacagagtgagactccatctcaaaaaataaaaattaaataaatgaataaaataaaaatgaaatttaagtaagtggattactgtcaattcacgtcttaaagtgaactacattaagtgagaaaaggctaggtaccaaaaatatacatgttaataaaaatgtaaaattgtgtgtatatagattggcaacttaaaaaggagctgtatgtgaagtaaataaaattttttgtttatgttgcacttttctctaagttgccgatattcataatttgtttttttttaaaatgagaactctttttctgaatgaagttcataatttaaaacactagtttttgaagagctatcacaaggcaggacacaatgcagattaattttataaacaatgactgcagctttrggctgggtgtggtggctcatgcctgtaatcccagcactttgggaggctggggcaggcagatcacctgaggtcaagagttcaagaccagcctggacaacatggtgaaaccccatctctactaaaaaaatataaaattagccaggtatagtggcgcacgcctgtaatcccagtttcttaggaggctgaagcaggagaatcacttgaacccgggaggtggaggttgcagtgagccaagatcataccattgcactccagcctgggcaataagaatgaaactctataccccccaaaaaaataaaaatatataaataatgactgcaacttcagatgtgagaaggaataagtggatcgtttaaacctttttcataaatacctttaattgtatagcagtcagaactatctaagttaatcatgtccagtttttattatggtaagaatacttaatatgagatctaccctcttagcaaatgtttaattttacaacacagtaccgttaactataggcataatgttgtacagcagagctctcgaacttactcattttgcaaaactgaaactttatatctattggactgcaactctccattttcccctcatgtccagcccctggcaaccattccactctgcttctgtgagtttgactattttagatacctcatacaagtagaaccatccagcatttgtctttttgtgactggcttatttcacttaacataatgtcctcaaggtttcatccatactgttrcatattgcagaatttctttcttttttaagcctgagtagtattccactgtatgtatatatactgcactttctttatccactcatctgtaatgaacttttaggttgtttccacatcttgggtattgtgaataatattacagtgaacacaggagtgcaagtatctctgctctgcaagattcttttttttttttgtggaaacagagtcttgctcagtcacccaggctagagtgcagtggcatgatcttggctcactgcaacctccacctccgggttcaagtgattctcctgcctcagcctcccaagtagctgggattacatgtgcacatcaccatgcctggctaatttttgtatttttagtagagactgggtttcaccatgttggccaggctggtctcgaactcctgacctcaaatgatccacctacctcggcctcccaaagtgctaggattacagacgtgagccactgcgcgtggcctctctgcaagattctgacttcaattcttttggatgtatacttagaagtggggttgctggatcatatggtagttctatttttagttttttgaggaatctctatcctgtttttcatagtggctgcatcattttacattcccaccaacaacgtgcagggttccaagttctccacatccttgccaacacttattatcttttgtcatgaactctgtttcataatttgatcccactgttatggaaagaagcattttgaaagtttatagagagaattttgttctgaatatgaataagtttcagaatctgaaagtgtttttgtggtttattggtagaagtagaaaacatgagattttaaaattttttatttaaacttgtaaattattatcactcacaaaagaaattattcctctgtgtcatcccaccagaaataaaattgacaaattattattttgtttccttttcagaattaaaattttagagatgtttagtgctcataatctccagtctgtgttctctcggctcattgaacctccacacaccgattctcttcgtgcctcaaaaatacgattacgagacttaggagcattaactccagatgaaagattgacccctcttgggtatcatttggcctctctgcccgtggatgtgagaattggcaaactaatgttgtttgggtctatcttccgctgtttggatcctgctctcaccattgctgccagtttggcttttaagtckccgtttgtaagtaaacaacattcatctmaactggagtctctaagaggaccataggtctctaaggggaccatgggggaatcaagggcatgtgagccccctaaaaatttgcttgtatgttagatgtgaatttttagggcacatctgcatgggagggagaaggtcaaaaataaatttctgaaaagacaaaaacaaataaaacaaacaaaaggattttttagggagcaatgtcatccaatcctcaaagagatccaccctccaattaaagactgagaactagagatataacttattaaaagtaatccaggccaagcgcggtggcttatgcctgtaatccccgcactttgggaggcggaggcgggcagatcatttgaggtcaggagttcgagaccagcttggccaacatggtgaaaccctgtctctattaaaaatacaaaaaattagccaggcgtggtgatgtgcacatgtagtcccagctacttgggaggctaatgcaggagaatcgcttgaacctgggaggcggaggttgctgagccgagatcgcgccaccacattccagcctggcgacagagcaaggctccgtctaaaaaaaaaaacaactaatattaattcttctttagggcctggcgtggtggctcacgcctgtaatcccagctctttgggaggccgaggcaggtggatcacctgaagtcaggagtttgagaccagcctgaccaacatggagaaaccccgtctctactaaaaatacaaaattagctgggatggtggtgcatgcctataatctcagctactcgggaggctgaggcaggagaatcacttgaacctgggaggcagaggttgcaatgagccagtcgcgccatcgcactccagcctgggcaacaagagcgaaattccgtctcaaaaaaaaaaattatcattaaatgtttagtagaattcagtggtataaagccacctgggccggggggtggtggagcaggagtgttggtgggtagttgttttattattaattcaatctcttcattagttctaggacttttcagattgtctatttcattttgagtcagttgtgatagtttatttttttctaggaattttattttgtctaacttatctaatttattggcatataattattcataatgtccctttataatcctttttatttctgtaaggctagtaataatgtccctttttytgattctagtaacttgagctttccctctctttttcttggtcagtctagctaaagatttgtcaattttctttgtcttttcagagaatcaacttttggttttattttttgtttttgagatggggtctcgctctgttgcccaggctggagtgcaatggtgcagtcttggctcactgcaacctccgacttccaggttcaagcgattctcctgcctcagcctcccgagtagctgggattacaggtgtgtgccaccatgcccagctaatttttgtatttttatagagacggggtttcaccatgttagtcaggctgatctctaactcctgaccttgtgatctgcctgcctcagcctcccaaagtgctgggattgcaggtgtgagccaccatgcctggcagttttattaatttttttcaattgtttttccgttctttatttctttactgtctgctctttattctttccttccttctgtttacttaaggtttaggtggctcttctttttctagtgtcttaaagtagaagtttagtttcttgttttgagatctttcttttttatataagcatgtatagctctcagtttttctctaaggactattttagctgcatcccacacattttggttttccttttcattcatctggaagtattttctgattttcctttttattctcctgtgaccctttgattatttaggcatgggttgtttaatttctatatatttgtgagttcrcaatttttttttcattatttctaatttcagtctactgtgaacagagaacatatttgtattatttcaatcctctttaaaatgtattgagctttgttttatggtcaagcatatggtctgtcctggagggtgttccacgtatacttgagaagaaaggwttttttgctgttgggtagagtgtcagtctgccttttttttttttttccttcattaaaaaaaatctttttttactggtcctttcatgataagcaatctgcctttatttttatcatggcttattttatatagttcggagaataaatggatgtattcagtttcttcagttttaatgttatatgtcatcgaattataaactcacagatctgcaaaaatatcttagtccagctccctgacttaacaacaaattataaaccagctggtccagtggtagtgagttatctcaattgattgttgggacttgactactctttaaaaaaagaaaaaaagaaatgataaaaccaaggaccagaagaggtgacataacttgctgggggtacacagtatcaaccttgtgaacaggacttctattgccttttcccaaatcatctaaaccaacctctcactgaccattttcttttattggaataaagaaagactcattagagacgttgatgtctggtttgaggttccatggtgtaatggtgagcactctggaccctgaatccagaaatgttgatgtctgccttcgtttagtgatctgaagaaaaaaaaaaaagagagagagaaaagaaatattgatgtcatccttggccaaaactgagcacctgccctttgctggactctgtaaacataatattaatctcccacgtgcaatccttttcccactggcctgtctaaaaaggaaggaattttactttcaagtagaaattaaaattttattgctattgtattagttataagattatttaaatatacaaaaattagagagaagcactatggttggtttagaatgattttcagtggtgttgcaactagggcattggtttagattgccatgagaaactactgcagctcatgctgatacctttakagcctgagaaggtagagaaatattattattggattaatgaatcggtatgtgtaaagtggtgaaaattaacttccctgctgattttacacatttgtagggaaaaggaagacttgtaaacatttgtaataaaataagaggattcttcccagtgtagattttcaagtaaaacaataaataagagtaaaacactagttatgggtatagaagcaagggagactcaaacgtagaagacgaataagaatctgtaaaataaagaacccagataacagaatgttaggttttagatatagctttagaatgagtggctctttgatgactcttgccacttggaactaaaagacccagaagagcttattttgggtgggcaggcagacttgacagagcaaagactgtgagcttgccatttaccgtcataattgcctttcattagctgacccactgattacactttttccacacaaaatcctttcccaaggcatctggctttagcaatgggaaaatgccatttgaaacctcagataaaaagtgtcctgtaggacctggtgtggtggctcatgcctataatgccagcattttggtaggccgaggtgggccaattgcctgagcccaggagttcaagaccagcctgcacaacatggtgagactccgtctctaccgaaaattttaaaaaattagctggcctgatggggcacacctatagtcccagctaccagggaggctgaggcaggaggattgcttaagcctgggagataaaggttgcagtgggctatgatcgcaccactgcactccagcctgggcaacagaacaagaccctgtctttgaaaaaaaaaaagtgttctttaaatctgattttcctctctcctttaggtatctccctgggataaaaaagaagaagctaaccagaaaaagctggaatttgcattcgcaaacagtgattatctggcccttctacaagcgtataaggtaagtatataacctaatagcttagttttattaccagtgttggcactgaagactgagtaagttcagtttgattttctccaaaatttagggatggcagctaagtacaaaagaaggcgtgcgtgcaagttataattactgcagacaaaacttcttgtctggaagagttctgcaggtgagttgtgtctgtggctttttcttcatttttttattagagtagctcaccagagggtgctgcgactttgtctcatgtgtcctgtcttaacattgcaaatgttatttctggaatatgtttggccttaccagccrtgtaaaatggactcccgcactgtggcatcaggctttctgtgctgaacctttccactgacctccttttcctctttgtggtgaatttttgtttacttatgcggaagatagggtagaatataggcagtaagattgctgcttactggaagtcagttttttcagtaattacaccagggattctttttcatttgtttgtttgtttgtttgcttgtttgtttgtgacagagtctcattctgtctcccaggctggaatgcagtggtgcgatctcggctcacttgcatcctccgcctcccagggtcaagtgattctcctgcctcagacacctgagtagctgggacgacaggcacatgccaccatgctcagctaatttttttgtgtttttagtagagatggggtttcaccatgctggccaggctgctctggaactcctgacctcatgatccgcccaccttggccacccaaagtgctgggattacaggtgtgagacaccacaccgggctacaccaggcattcttaacctgaatccctaagcccctgaaattgtatacaaaattgtatgcttatacatatgtgcattattctggagaggcggaccatagctttcatcagcttttcagaggggtccatggccatctctaatccccttcccctctccccaaaaccaaagaactaatactgaaccagattttgttaatttttcttacatctatcagaacctactatgtgaatataatgagtatacaagaaaatgtttagcygggcttggtggctcatacctgtaatcccagcactttgagaggctgaygattgcttgagcccaggaatttgagaccatcctcggaaacatggcaaaaccccatctctacaaaaaatacaaaaatcagccagacctagtgacatgggcctgtaatcccatctactccagaggctgaggtgggaggatcacttgagcctgggaggtcaagactgcagtgagccatgaatgccctactgtactccagcctaggccaacagagggagatcctgcctcaaaaaataaaaataaaaaatgtcttatcttctgtataatgtagacagggcttctgtctcctgttgcaacagtgttttaggtgcccttccaaagtgatgaggccagggactatggctcacacctgtaatcccagcactttggaaggccgagggaggcagatcacttgaggccaggagttcaagaccagcctggccaacatagcaaaactccatctctattaaaaatacaaaaaattagctgggcatggtggctcatacctgtaatcccagctactcgggaggctgaggcatgagaatcgcttgaacccaggagatgaaggtttcagtgagttgagattgtgccattgcactccagcctgggcaacagagggagactttgtctcaaaaaataaataaataaataaataaattccaaagtggtatgagaagccaaaataatgatggcacgcatctttgcaaagcatgttttactcaaagattttgggaccctgcgcagtggctcatgcctataatcccagcactttgggaagccaaggcaggcagaacctttgagcccaggagttcgagaccagcctgggcaacatggcgaaaccccatctctacaaaaaaatataaaaattagccaggcgtgatggtgcacgcctgtggtcccagctactttggaggctgagaatcactaatcaaaagtgggtggggggctgtgtttatatgtacagggcaataagaaatattttctcaagtcattaagatgcttaaatataagatgaggatatttcttttaaattacatttcctactaaatttttttttcattaggatatgtgtagattttgctgtgacttatgaggtccatcaaacaagagttgcatcttttcactaaacttcaacttagattgtaggattgtttttattaagatttcaattaaaactttgtcatgaaatagaaactgcggtatatttaactcctaattatattctagttatccatgtatacttgagacattccaagaaaatacttaaaccatcattgagagacagggtagtgttgcttagctttcagttccttgaatgattattatttccttctctttgtctgatgtgcagcctatgtgagaacagtagccacaagaaaaagaagtttgtgctttctttctcacatttgtgctcagccactaaaaggagcatctcaatcttaaaccatggccgggcgtggtggctcatgcctgtaatctcagcgctttgggaggccaaggtgggcggatcacctgagatcaggagttcgagagcagcctggccaacatggtgaaacctccgtctctactaaaaatacaaaaattggctgggcgtggtggcacacacctgtagccccagctactcgggaggttaaggcaagagaatcacttgaacccaggaggcagaggttgcagaaagccaagattgcgccactgcactccagcctggatgacagagcaagactctgtctcaaaaaaaaaaaaaatattgaatcacttaatgatgtccctattcctaggaaaagagatgagccagcaagaccataatgaaggagaaagaggaaacattctgctgagttccactgagagcacgaaccactctaggcctgagtaaggaactgagaggacaggagcaaaaatgcaagtaggaaaagctaggtagtagacagtgccgcagcacttggagttggaattccagtcaaaacaaacagcattttttgctgtcctaagaatttcgtggaaaatcaggcctacccaaaatccartgagagtgtttaaaattgtaatctagagttaaataaatgatccttggatttattgaatttttgcatttctgcataaccgtttcagtttgcctgccagtttgcgtaagtgaaagctgcttcttggaaatgaccagacaagatcctcttcatacctgaggaatgaatccacttgagcctcattgctaccccctgaaataatgcatttttataatcactcatttttgtaagacttaacactttgttatgctgatgcccttgcttaaaggtttttccacttctttcaggaaatggccagcctcaaacgacaattcacggaactgttatcggatatagggtttgcaagggaagggctcagagcaagggaaattgagaaaagggcccaaggaggagatggtgtcttagatgccacaggagaagaggtaaagaatgtggagttggttctyatttctctttaattagcacctaaatacaatcttaacctgggaacacttgtagacattcttcttcacttaagcctttgagcagtgggttaatggcattcttgattttctgcttcgcacaaataaatatcagctgatctggcacagtggctcgtgcctataatcccaacactttgggaggctgaggcaggtggattgcttgagctcaggagttcgagaccagccagagcaacatggtgaaatccctcatctctctacaaaaaaattagccaggcatggtggtgtaccacctgtcttcccagctatgtgggagggtgaggtgggagaatgatgtgatcccaggaagcagaggttgcagtgggctaagattgagacactgcactctagcctgggcaacagagccaaaccctgtctcaaaaaaaaaaaaagtataaaaaaatttttttaagtgtcagctaacactcataagaatagagggggctgggcacggtggctcatgcctgtaatcccagcactttgggaggccaaggtgggcagatcactcaaggtcaggagctcgagaccagcctgcccaacatggagaaaccctgtctttactaaaaatacacaattatccaggcatggtagcacatgcctgtaatcccagctactcgggaggctgaggcaggagaatcgcttgaacccgggaggtggaagttgcggtgagccgagatcgcgccattgcactccagcctgggcagcaagagcgaaactctgtctcaaaaaaaaaaaacagggttttctgctcattgttgctgttgtttttggtttttaaatttcatgctgcttcttgataaattcataagagatagaatagacttccggtagaattttctcaaatcagrccagcattttttctaacaaaagacagctttttctataactataggaagagcacttctgtaagatgaacctgatgctcctgtgttccgagtgcagttagcactttctggagattctgaacatctcatgaaccataatttttttctccatttatactcaggaacactggctttgtaacgctttgcaaaggtctagaaagtcattgtaggctccttggagtgggtccaatgtgactgtggtccagtagatttgtttttttacttagaaataatttttctagcaaagagatagaaattrggtgctcttttttttgctttaagatagagatcaaatataataaaacggtaaatcctacagcacagacagaaatagccatattagagccagacgcagtggctcacrcctgtaatctcagtactttgagaggctgaggtgggcagattgcttgaggtccagagttggagaccagcctggccaacatggtgaaaccttgtctctactaaaaatacaaaaattaaccgggcatagcggtgtatgcctgtaatcccagctactcgggaggctgaggcaggagaatcgcttgaacctgggaggcggagrttgcagtaagctgagatggygccactgcacacttgcctgggtgacagagcaagactccatctcaaaaagaaaaaaaagaaatagccatatcayttgttaattaatgctgtgcttttctcataggcaaactcaaatgctgagaaccccaagctgatatcagcaatgctgtgtgctgctttgtatccaaatgtagtgcaggtaacaaaacatttttcctagatctttccattttttgtttgatttgtagccaagtgatgtaagttaagatgtgcatattaatcatcttaaagagatatatacgcatgtgtgcacacaygcacacccttttaaacttagtatacattttcggccgggtgcggtggctcacgcctgtaatcccagcactttgggaggccgaggcgggcggatcacgaggtcaggagatcgagaccatcctggctaacacggtgaaaccccatctctactaaaaatacaaaaaaaattagccaggcatggtggcgggcacctgtagtcccagctactcgggaggctgaggcaggagaatggcatgaacccgggagtcggagcttgcaatgagccgagattgcgccactgcactccagcctgggtgacagatggagactccatctcaaaaaaaaaaaacttagtatacattttcaatccttcagttcccaaaatctgtttggatacattattcaataacacatttattgtataaaatttttaatccttctgacatatgatattccaaaaattaaaatagacataaatgtcagtcggccaacctatatataactaactttctatgttagttggaaacttgattcaactacagtttatcttacactctctactctgaacaaaaagtaaaatagccaggcatggtggctcacgcctgtaatcccaacactttgggaagccgagttgggcagatcacgaagtcaggagtttaagaccctcctggctaacatggtgaaaccctgtatctactaaaaatacaaaaattagctgggtgtggtrgtgcatgcctgtaatcccagctactcaggaggctgaggcaggagaattgcttgaactcaggaggcggaggttgcagtaagccaagaccatgccactgtaccccagcctgggccacagaccgagactctgtctcaaaaacaaacaaayaaacaaacaaacaaacaaacaagtaaataagggacaggcacgatggctcacgcctgtaatccaagcactttgggaggccgaggcgggcggatcgcctgaggtcaggagttcgaggccagcctgaccaatatggagaaaccccatctctactaaaaatacaaaattagccaggcgtggtggtgcatgcctgtaatcccagctactcaggaggctgaggcaggagaatcgcttaaacccgggaggcagaggttgtggtgaggcgagatcataccattgcactccagcctaggcgactagagcgaaactccgtctcaaataaaaataaaaaatcagtgctttgccataagaccacctgtggccagccttctggaaaccctacttgagtgtgctcttggacttttacctgagttttgattatccatccctaacaaggcaccattttcccccagagagtttcaatttggcagaatactgaatcatttttcaaagccttaactttttttattaaatcctcagttaacatctgactgatttatggctcattttctgcttagcatttgtatgcttttcaaaccatttgaaatgtacttttaaaaaaattgtttgtgctttgtagtgtggttatgaaagggaaaaaagtcatttggatatagatttactggtttttatattatactctagtaatgtaaggtcttaccgttggtggaagctgggtgaagggtacaaggaactctgtactattttgccgcttcctgtgagtctataattatttcaaaataaaaagattatttaaaaaagaatgtgggggccaggagcattggctcatgcctataatccaagcactttgggaggctgaggtgggcggattgcttgagctcaggagtttgagaccagcctgggcaacatggcaaaaccctgtctctaaaaaaagaaaaaagaaaaagaatgtggggaaaaatcatttggagacttaaaatgtagaaacaaagaacataaatgtggtataagaagttttaggtgacaatatagttttgaggctaaaccaaaaaggaaaaggagatatatctgactgtatatctaagaactcaccaataagaaagacgtgggccctgctctgttgcctgcctttgctccccaggccccgagtggttcactgagccatgaagacagattccaggcaccaggaattgcacctccaatcccagatgctatgttcagcaaaggctccatggttctggcctacagtgccggcctggacacctcctgcatcctcgtgtggctraaggaacaaggctatgacattattgcctacctggccaatgttggccagaaggaagacttcaaggaagccaggaagaaggcactgaaccttgggtccaaaaaggtgttcattgaggacgtcagcaaggagttcgtggaggagttcatctggcctgtatgaggactgctacctcctgggcccctctcttcccaggccttacatcacccgcaaacaagtggaaattgctcagtgggagggggcaaagtatgtgtcccacagtgccatgggaaaggggaacgatcaggtctggtttgagctcgcctgctactcgctggccccccagattaaggtcattgctcccgggaggatccctgagttctacaaccagtccaagggccgcagtgatctgatggaatatgcagagaaacatgggattcccatcccagtcactctgaagcacccatggaacatggacgagaacctcatgcacatcagccacgaggctggaatcttggagaaccccaagaaccaascaccttcaggtctctacatgaagattcaggacctggccaaagcccccaacacccccaacattttcaagactgagtaaaaaaggggtccctgtgaaggtgaccagcatcaaggatggcaccacccaccagacctccttggtgctcttcatgtacctgaatgaagtcgcaggcaagcacagcgtgggccatattgacatcgtggagaaccgcttcattgaaatgaagtcctgaggtatctgcaagaccccagcaggcaccatcctttaccaccctcatttagacattgagggctttgccatggaacaggaagtgcgcaaaatcaaacaaggcctgggcttgaaatttgctgagttggtgtacaccggtttctggcacaaccctcagtgtgactttgcccacyactgcattgccaagtcccaggaccgagtggaagggaaagtgcaggtatccatcttcaagggccaggtgtacatcctctgccaggagcccccactgtctctctacagtggagagcaggtgagcatgaacgtggagggcaatgatgagccagccagtcggtgacaccagtctcatcaacatcaattccctcaggatgaaggaatatcatcatctccagagcaaggtcactgccaaatagacccctgtacaatggggagctagggccacctcactttgcagattccccaagtacaggcactaattgttgtgataatttgtaattgtgacttgttctccctggctaagagtgtagtggggctgccgggccccagctttgttccctggtccccctgaaatggtcatcaaagggaagggtgaggggcagctacagtggggagctataaaatgacaattaaaaaaaaaaaaaaaaaagactaaggccagccacggtggctcacgtctgtaatccctgcactttgggagaccgaggtgggcagatcacctgaggtcaggagtttgagaccagcctggccaacatggtgaaaccccatctctactaaaaaatacaaaaattagctgggcgtggtggtgtgtgcctgtaatcccagctacttgggaggctgaggcagaagaatagcttgagcctgggaggcagaggttgcagtgagcagagatcgcatcattgcactccatcctgggctacagaacatgactccgtctcaaaaaaataaataaataaagactaaataaaagatctaatagaacctaatagaaaagtgggcaaaggacatgactgaacagataatacayacacaaaaattatattcagtgttactagcaagaagaaatgcaaattaaaacagcaaagaaggccgagtgcggtggctcacgcctgcaatcccagcactttgggaggccgaggagggtggatcacaaggtcaggagttcaagatcagcctggccaatatggtgaaaccctgtctctactaaaaatacaaaaaaaattagccaggcatggtggcgggtgcctgttgtcccaactacttgggaggctgaggcaggagaatcgcttgaacctgggaggcagaggttgcagtgagctgaaattgcgccaccacactccagcctgggtgacagagcaagactccgtctaaaaaaaaaaaggaaaaaaaaaaaacagaaagaaatagcctctttttactttttaaattggcaaaactgggctgggcatagtggctcgtggcactttgtaaggctgaggtgagaagatcacatggggccaggagtttgagaccagcttgggcaacagagtgagaacttgtctctacaaaaaaaatttgtttttaattagccaggcatggtggtacatgcctgtagtcccagctactcgggaggctgagatgggaggataacttgagcctaggaaattgaggctgcagtgagccgtgattgtgccactacactacagccggggtgacagagtgagacactgtctcaaaaaataataaatrggcaaaactttttaaaaattataatactgccagacatggtggcatgcactggtaatctcagttacttgggaggctaagataggaggatcactgtagcccaggagttcaaggccacagttagctatgactgtgcctgtgtatagccactgcactccagcctgggcaacacagagagaccctatccctgaaattaaaaataggccaggtaaggtggctcatacctacaatcccaacattttgggaggcccaggtgggaggactgcgtaaggccaggaattgaagaccagcctgggcaacatagcaagaccccatctctaccaaaaatagattaaaataaataaatagttgtttgataataatgcaaataaataaataatataatgctggtgctgtcatgaaccccccaaaatgagtactcttactctgggtgggaatataagtttataccccctttctagatagcagttttattcctagggatttgttattaggaaacaattgcatatatacacaaagatacagctaggagaatattcatttcagcactttatatttgcagacaatctaaatttgaaaaaacagggtatttattggttaaattattataaattcttacaacaaggtcttatatatccatcaaaaattatgttttaggaaaatatgtcacaacatggaaaaatgttcttaatatattaagtttaaaaaagtaggctataaaaaaagattctattttagtttcaagacatgtttattttcaagacatcattgaaaatacatcattttcaagctattttatttatgtgtttatgtttttctctttttctatatataaatataaatttggaagagmagattaaaatgatatttactggctgggtgcagtggctcacgcctgtaatcccagcactttgggaggctgaggtgggtagatcacaaggtcaagagatcgagaccatcctgaccaacatggtgaaaccctgtctctactaaaaatacaaaaattagctgggtgtggtggcgtgcacctttagtcccagctactcaagaggctgaggcaggagaatcacttgaacccgagaggcggaggttgcagtgagccaacatcacgccactgcactccagcctggtgacacaacaagactccatctcaaaaaaaaaaaaaaaaaaaaaaaaaaaaggcaagacacagtggctcacgcctgtaatcccagcactttgggagacagagggaagtagatcacctgaggtcaggagttcgagaccagcctgaccaacatggagaaaccacttctacactgaagatacaaaattagccaggcgtggtgctcatgcctgtaatcccagctacttgggatgctgaggcaggagaatcacttgaacccaggaggcggaggttgcagtgagccgagattgcaccgttgcactccagcctgggcaacaagagcgaaactccgtctcaaaaaaaaggccgggcgcagtggctcacacctgtaatcccagcattttgggaggccgacgcaggtggatcacaaggtcaggagatcgagaccatcctggctaacatggtgaaaccccgtctctactaaaaatacaaaaaattagccgggtgtggcggcgggcgcctgtagtcccagctactagggaggctgaggcaggagaatggcgtgaacccgggaggcggaacttgcagtgagcccagatcgcttcactgcactccagcctgggcaacggagggagactacgtctcaaaaaaaaagttatatttactggtccggttgtagtggctcacgcctgtaatccagcactttgggaggccgaggcaggcagatcgcttgaggtcaggagttcaagaccagccttgccaacatggtgaaaccacatgtctactaaaaatacaaaaattagctgggtgtggtggcgcacacttgtaatcccagctacttgggagcctaatgcaggagaattgcatgaacctgggaggcggaggttgcagtgagccgagatcgcaccagtgcactctggcctgagagacagagtgagactcggtctccaaaaaaaaaaaacaaaacaagaaatgtgttgggattgggatactcagatctctggtccagtgtcatcagctgggtcactgcacctgatcatcagtacagacccaaaatatcaatatagttttctcccacatggcctcaatgtggtatagacacccagagccactgcacctatattcatacttcttggtggaaaaaaaaaaaaaaagcatgtgcttgttctgctttcagaaggaaacaaaataagaaagaaagggaacaaacaggaaagctattcaagcaagactgagcaagactggttttgtgcttttgtgccaagagatactttctatgagaatatatatattatatgtctatttttacaaatacttgttgtttaggtgaaaagcccagaaggaaaatttcagaagaccagtactggagctgtcagaatgcaaccaaaatcagctgagttgaagtttgtcaccaagaacgatggatatgtacacattcacccttcatcagtgaactatcaggtcagaatggtggagtatacttaatgtttacaggtcgtcctggggtaggaaatgcaattccttaaattcagccacaccatgttctatcacttgctgtccccagcaataccrctgactgagggaagattgaataagaataaacagactggaaattggactatttctggaaagactatttccatttgaagaaaattctactgaataccaaaaagtactcaagcctgctttcagatataaaattgtttctttgcaatggtaattgaagtcatgagctaattacatcactgaatctgtgccttaaaaggaaatgaatgacctattcttgcataccacttcctcagctctcagcctgccactgaggcttctgcccccaccacttcactaaacccatcagaagtaacaaataacttcttagttgtcaaagccagtgtcatcccttggtcctcatcatgccacctctcacatggtatttgacattgctaatctgtcttcctcttgaaattctccttgatgttatttttgcttctgaaatatcactttcttctctctctctattcatcccctctatctcctttattagcttatcttcctttgctctgaaacagtggttctatcctttgtccttattctctcaccatcatgccctcttcctgaaccaccaaaggcacaacagcacttacacatcccaactgccacttacacacagacgcagaccccaaatctgtctctccagacctgcagtttttttctgagctctcctgctggaaaacatcagctagaagtcttttagtcatctcaaacataaaagctgaaaaatcaaactcatgatccccaattcactcttctctttctgtgctgtcttggtggaatgataccatcaaaaccagaaccctgaagtcacatagactcccacttcttttcttatgccaactgagttggtcaccaggtcccaagaatgcctccttgttgacatctctaagatttgccttttatcccsactgccacttccttagctcaaaccccaaacatcatttgcctgaaattctataataatcttacatctggtgctttctgtctccaaccttctactactctactgctgccagaattacctttacaaaacatcaattagactatgtcaattccttgcttaaatcttcatatccagagtgtaccacacactctcacatgactccttacatggcccttcctataccttgtcaccaaatttgaaacattcaggctgctctatcctctggaactactgaggaccatgttcacaaagcctggaaaggatttccttaagcttagaggagtttgagggtcaggaggtcatctgccttttcagcctgttaggaaccagacgcctgagttagctccacaccccctccttttttatatatactttttgttgttgttgttttgcatgtttctcaagaaagaactactcctcttttgagaatccaaatcgttcatgtatccatgtaatatctactagcgcctaatctgtgccaggcactgttgtaggctgttgaggacagtggaagaaactagatggacacagtctctgccctcaagaagcttatgttctagtgagggagacaggcaatacataagtaaacagaatctcaggtaatgctataaagcaaaatagagcaggatagagagacagagagtgacaggagaggggccctgcacgtggggtggtcagggaagaactscgggatgagaaacaactgagcaaatcctaaatgaagagcaagtcatgcagatagagagaaaggagaaacattccagcagaggacataagtgcaaacatcacaaggtgggagtgtatttggtgtgttccaggaaatgcatgaagaggccagtggagagggatgatcaagggtgagagtggtgggagatgcacggggacgagtaggcaggggtggggtagggctgggtggacctggtagccatggcaaggacttgagatttttatccttggacaccattggagggttttgagccataattggacttattgtttttgtttttatttttatttttattttatttatttattgagacagagtctctctctgtcacccaggctagagtgcagtggcacaatctcagctcactgcaacctccacttcccaggttcaagggattctcatgcctcagccccctgagtagctgggattacaggcatgtgtcatcgctcccagctaatttttgcagttttgtagagacggggtctcaccatgttagccaggccagtttcaaactcctggcctcaggtgatccacctgcctcagtttcccaaagtgctgggattacaggcgtgagccaccacgccctgccagacttatgtttttaaaagatcaccttgattgctgggtaggaaagacactataaaaatgcaaaactagaagtggggacagcactctagaaggcatcacagtggtttctgtgagatgacaatggtttgtactaaattggtagctgggtgcctataatcccagccctttgaaaggccgaggcgggcggatgacttgaggtcaggagtttgagaccagcctggccaacatggtgaaaccccatctctactaaaaatacaaaaattcgccaggtgtgatagtgcaagcctgtagtcccagctacttgggaggctgaggcaggggaatcacttgaacctaggaggtagaggttgcagtgagccaagatcatgccactgcactccagcctgggtgacagagcgagactgcatctcaaaaaaaaaaaggctgggtgtggtgactcacacctgtaatcccaggactttgggaggccgaggcaggcagatcacctgagttcaggagttcaagaacagcctggccagcatgatgaaatccctgtctctactaaaaatacaaaaatcagccaggcatggtggcaggcgcctataatcccagctacttgggaggctgaggcaggagaatcacttgaacctagggggcagaggttgcagtgagccgagatcacaccattgcactccagcctggacaaaaagagcaaaactctgtctcaaaaaaaaaaaaaatttgttagctgtagaagtggtgagaatatgtcaaggcattttgtaatttgaaaagagagctgactagacttagtgacagtgtagatggtgtgaggggaaaaaaatagtcaatgatgactcctaaattgggggcctgagcagctgggtgaatgggagcatcatttcctgagatagggaacactgcaaggaagaagaatcaagaattccatctgggccaggcacagtggctcacacctgtaatcccagcaatttgggaggccaaggcagaaggattgctggagcccaggagttcgagaccagcctgggcaacatggtgagaccctatctctrcgaaaaaatttaaaaaataaaagcttttttttttttaaacacaagtgtgagatatgtattaaatgtccaagaggagatggcaagtcaatagttatactgcagatctggagctcaggaaagtcacgggctatagataaatttggggagtcattaataggcagtatttaaatccgtgggactggggggttgttccctttttgttgccagtgacatcactgtcatcatctraggttttttgttacaggtgagacactttgacagcccctacctgttgtaccacgagaagataaaaactagtcgagtattcatccgagactgcagcatggtgtctgtgtacccgctggtcttgtttggaggaggccaagtgaatgtgcagcttcaaagaggagagttcgttgtctccctggatgatggttggatccgttttgtagctgcttcccatcaggtaaaggcagaattggtctgttttatgaggctcaggccatgaggggctttgacaatatgaagttatgaagtcaagggcattcctctagggaccaaggtaacagagctaattaaaaatgaatgacggtggccgagcccagtggctcacacctataatcccagcactttgggaggccgaggcaggcagatcatctggggccaggagttcgagaccagcctggccaacatggtcaaaccccgtctctactaataatacaaaaattagctgggcatgttggtgggtgcctgtaatcccagctactcaggacgctgagacatgagaatcgcttgaacctagggggcagaggttgcagtgagccgagatcgtgccattgcactccagcctcggcaacagagcgagattccttctcaaaaaaaaaaaaaaaaagtgaatgatggtctacaatgagacactaagaaagagtgaggctgaagtgaagccaggagtggagccctagtaagagttccagaaagcacactgtgaggggaagtctggtacgggctgaggttagtataaaaggctaggacagaagctgtaaagtgagggtgctggaccttccttattgttatataaataatagatgttcaccaaagaaaagtcagaaaatacagataagcaaaaataagtaaataaaaaccaccctgattccaccactaccattttgagaaaaagataatgggtctgaattcttcatttattctcaggtctcaattattccctatatggagtctctgtgaaaaacatatcatggagagtacatatttaagaaacagaacttcacccaggtgcggtggcttacgcctgtaatcccagcactttgggaggccaaggtgggcagatcacctgaggtcaggagttcgagaccagcctggccaatatggtgaaaccccatctctactaaaaattttaaaaaattaaccaggtgtggtagtgggcgtctgtaatcccagctattcaggatgctgaggcaggagaatctcttgagcccaggaggcggaggttgcagtgagccgagattgcgccattgcactccagcctgagcaacaagagggaaactccatctcaaaaaaatgaatatataaaaatacaaaaaaaaaaattagctgggcgtggtggcgggcgcctgtaatcccagctactcaggaggctgagacaggagaatcacttgaacccaggaggcagaggttgcagtgagccgagattgcaccactgcacttcagcctgggtgacagaatgagactccgtctcaaataaataaataaatagatagatagataaaacttcaggtggacacccgtaatcccaactgccagaggctgaggtgggaggattgctcaagcccaagaggtcgaggcttcagtgagccatgattgcaccactgcactccagcctgggtgacagagtgagactctgtcccaaaaaaagaaataaataaaatttcattttaatatctgcatctgttagaattcttatgttacaagaagcagatatgccaactcaaacattaaaagaaattgattggcatatttaactttaaagtccagagcagcagtgtccaacagaaatataatgtgacccacatatgtaattttaattgttctagtagccacatttttaaaagtaaaaagaaatagatgaaattaatcttaatatattttatttaacctaatacatccaaaatgttttaattttaacatgtaatcaatataaaattattaagatagtttacattaccttttcatattaagtcttcaaaatcgggtatatattttatattcgcagcacatctcagtttgggctggccacatttcatatagacattagataagccacttgtgactagtggctaccttactggatagtccaggtcaagaaggccaggcaacgttggtttgatttagcagttcagtggtgacaaaaacgtggttaacctagtggtatcgaaagggctgcaatagctcctggcatcacatgtatgcagcatatggtccagaagaagagccagaaactttcttgcctacaagctcaatcaaagctcccctcctaaaccaatccctgtgaccaaagggatgtcctgaacttgaatacctggagtacctgagccattcaccctggcagggctcacagtgtgaacctgtgttagagcagggtccgaactgtatgtttcccatacagtggggaaggggcaaaacagatgctgggaagatgtctacagtgccacaacatcagcataagcaaaatgccataaagcatacagtatatcccaaagctacagagatttttgattcatctaatatcttccacttatttatttttttttttgaggtggagtcttgctctgtcacccaggctggagtgcagtggcgcaatctcggttcactgcaacctccgcctcccgggttcaagcaattctcctgcctcagcatcctgagtagctgggactgcaggcgtacaccaccaagcccggctatttttttttttttttttttgagatggagtttcgctcttgttgcccaggctgaagtgccatggtgccatctcggctcaccacagcctctgcctcccgtgttcaagcgattctcctgcctcaccctcccaagtagctgggattacaggcatacgccaccacccggctaattttgtatttttagtagagacggggtttctccatgttggtcagcctggtcttgaactcccgacctcaggtgatctgcccgccttggcctcccaaagtgctgggattacaggcatgagccaccgcgccaggctaatttttgtatttttattagagacggagtttcaccatttggacaggctgatctcaaactcctgaccttgtgatccgcccacctcggcctcccaaagtgctgggattacaggcgtgagccactgagcctggcccacttttttttttttttttttttgagatggagttttgctcttgttgcccaggctggagtgcaatggcgcgatctcggctcaccacaacctctgcctcctgggttcaagcaattctcctgcctcagcctcccgagtagctgggattacaggcatgtgccaccatgcctggctaattttgtatttttagtagagatggggtttctccatgttggtcaagctggtctcgaacttccacctcaggtgatccgcccacctcagtctcccaaagtgctggaattacaagcgtgagccacccggcccagcctatctaccaccctttttttttttttttttttttgagacaacaaggtctgcagtggagtgatcggtgatcagtaaattttcttttcctttttttttcttttttttgaaacggagtttcgctcttgttgcccaggctagagtgcaatggcgcaatcttggctcaccgcaacctccacctcccaggttcaagcgattctcctgccttagcctcccaagtagctggaattataggcatgcaccaccatcccagctaattttgtacttttagtactaagagacggggtttctccacrttggtcaggctggtctcgaacccctgacctcaggtgatctgcccatctcggcctcccaaagtgctgggattacaggcgtgagccaccgggcccggccctctctaccacttttaattccccattttcctgcttctcctcgtggaataaatcataaaaattgaccaaactttaatatggagaacactatataaaagccatacttccagactgaatcttttcttttttggggagcaggggggacagagtctcgctatgtcacccaggctggagtgcaatggcgcgatctcagctcactgcaacctccacctcctgggttcaagccattctcctgcctcagcctctgagtagctgggattacaggcgcatgccaccacaactcrctaatttttgtatttctagtagagacaggatttcaccatgttggccagcctggtcttgaactcctgatctcatgatccgcccgccttggcctcccaaagtgctgggattacaggcgtgagccactgcgcctggcccgaatcttttctttagatgagatgtgatagaggcacttttttacaatggacctcatttagtctattacaaaatgaaaatgtatttagggtttttgctcctaatggagttaaaattagtaccagaaatctaaataatggtaatcataacttgggtatttccctccaataacctaycctgcctgttcctccaagcactgcttatattgtagctttcattttaggtggctgaactggtaaaggagcttcgttgygaacttgatcagcttctccaggataaaattaaaaacccaagcattgatctgtgtacgtgtcctcgaggatcccggatcatcagcacaattgtgaaacttgtcaccacacaataaaaagcagtcttagagagtgcttgctactcacctgcttctagctcacctgggaaataacagcagaacctctacctcgaactaaagacctattggggctggccctggtggaggagcccagggcatgaagcccaaggcagctgaggcagtgtatatacccttagggccatttctaacaaagccttggccactcccagcacaatttggagtgtcaagggtgagagcctaaaacccagcttgcctgtctttgtctctgtgattgttctggagtgaattaagttcacctgataactcaaaagtgaatgtataatacaattctgttttaatctgtgtattctttttctcctactttttactggggtgagaggggcatgaagagaaatacgccttttttttttttyttttcctgtcgccaaggctcgactgmgagaagwcagaacagagaaggggaaaaaaaacccaaaattatgtgaacaagcaaaattaaaatttcattttaggctattggctactgagtaaacttgacttgtgaggggtttttatttttactcattaaaagtcaacttaaaaaaattgaatgagttctcttttggtattaaagtgcaagctggtcttatcgataacactcctattcttaaaagcagaacaatctagatgtcgtcatagttctacatttaggaatctttactctgtcttatcaactcacccagacacgaatcaccgaaggagaattttaatagcattcctggggcagagttggcatggatgaggtcaaaaaggttaccatcggatttacagccaccacaatgctttccatgaaattgcttattttcaaccacctgttaggttaatggggcgctagcattttggaaaaacatcaggggatttacattttccctggacatctatcagtatggcgaggaaggatcccaaattgctgagtagaaaaaatatttgtatgtttgtttagacctcagggccggacgcggtggctcatgcctgtaatcctagcactttaggaggccgaggcaggccaatcacatgaggtcagaagttcaagaccagcttgggcaacttggtgaaaccccatctcaattaaaaatacaaaaattagccaggcatggtgacaggtgcccatagtcccagctactcgggaggctgaggcgggagaatcacttgaacatgggaggtggggtttggagtgagccaagattgcaccattgcactccagcctgggtgtcagagtgagacactgtctcaaaaataaaaattaaaaaatggacctcaggacagggtcactacaggttccatagtatggatagaattcaaactaaatcaaaaccatctcagtgaaatcagtgaaaggtattcacttttcaaggtattattttagttaagttttcaggaagtctgcttggctgtccaaaatgattattatcaagtatatttaagctttggtgcacttgaagagcttagactctaagcagtatttttaaaaggcatcgattcatgtcatcgctttaaataaaaaacatacatatgcaagcacccacagaatccaaattctgacttgctgttgaaacaaggctcctattacagaactgattaggctgagacctttagaagaaattaagaaaactgcattaagcctctaaaaaagttttgttttcctttttttttttttttttttttgacggagtttcactcttatcaccccggctggagtgcaatggtgggttctcggctcactgcaacctccgcctcctgagttcaagcgattctcctgcctcagcctcccaagtagccaggactacaggcatgtaccaccacacccggctaattctgtatttttttagtggagatggggtttcaccatgttggccaggctggtctcgaactactgacctcacgtgatccacccacctcgatctcccaaagtgctgggattacaggcgcgagccaccacaatcagcctaaaaaagtttttaaaaatcagttttcacggctgggcgcggtggctacgcctgtaatcccaaccctttgggagatcgaggcgagtggatcacctgaggttgggagtttgagaccagcctgaccaacgtggagaaaccgtgtctatactaaaaatacaaaattagccaggcgtggtggtgcatacctataatcccagctactcgggaggctgagacaggagaattgcttgaacctgggaggcggaggttctggtgagccaagatcgcaccattgcactccagcctgggcaacaagagcgaaactccatctcaaaaaacaaaaacaaaaaacccatcagttttcactcttggtgctacagtggtgctcatgccaccctagctagagccatctgcccaagtgggcctgcagcatttaacacaagtttgccccagagcactcagctgggagataattaacagcaaaactttccacccagtgaaactgattccttcgggaaagccagctcttggatggtcacttccaaccacatatagatgcatgaatactgtcatgatatagatgtgccagaatgtgataaaggttgggaagccttgacataacgcattgagtaagaatatcctcgccccaaagactaaacttcttaagctcattattaaaataatgaaataagaaatgaaatagaattacttatttatgatgaaagatcagaatgcaggccgggcatggtggctcacgcctgtaatcccagcacgttgggaggctgaggtgggtggaccacttgaggtcaggagttcgagaccagcctgaccaacatggtgaaaccccatctctactaaaaccacaaaattagctgggcatggtagcacatgctgtgatcccaactatttggaaggctgaggcaggagaatcacttgaacccaggaggcggagtttgcagtgagccaagatggcaccattgcattccatcctgggcaataagagtgaaactctgtcttaaaaaaaagaaagaaagaaagatcagaatgcagtatagtgtttcaaggattttttttttttcttgagacggagtctcactgtgtcacccaggctgacacaatctcggctcactgcaacatccgcccccgggttcaagcaattctcttgcctcagcctcctgagtatctgggattacacgcacctgcctccatgcctggttaatttttttgtctttttagtagagacagggtttcaccatcttggtcaggctggtcttgaactcctgaccttgtgatccacctgcctcggcctcccaaagtgcagattccttctgctctttgataaacaaatgattaaaacttgtaagattttaaagccccttaagtataagtgattggctacaaatctcatctaagaccaatgtctttgataaataattttagaggtgacagcttagaaacagcagaaagtctctccatgttaatgattcatcacggttaactgttcacccagtcattccatcgctttacatttatgggaccaaaagacatggaagaagcttatcactctggaacagtctgaaactattgctctgacaacaaactgaatgagctgtttccacgttgtttccatttagggcacctctgtactgtgatcatgcaagtattgactgacacagattcgtgaccaagatctaacttctgaaaacaacaactagccttgtatttattaactagctgagtattttaagcaaactttacccctgcatgtgggggaaaataagccagaggaattatgcttaattcccgtgtgatttaggaggaaaaagccaacctctgcctaggcttgttcaagcataatgcagtatgagcatattctgctgcctccaggaattcattatttatgtggcaactgagtgacatccacgagacaacctcaatagtgtgatgccccaagttcacccgctatgggccttgcaatcaagaaaacacaacacagactggagtccccacagagccagcccgggctgcacctgaaaaatcacatcctcagtcttaatgccttacatttgctgtattttaattttacagattgctttcacaagatcttttttttttttcctgagatggagtctcgctgtgtcacccagggtggagtgcagtggcgcagtcttggctcactgcaacctccacctcccgggttcaattgattctcctgcctcagcctcctgagtagctgggattacaggcgcatacaatcatgcccggctaatttttgtatttttagtagagactgggtttcaccatgttggccaggctgatcttgaactcctgtcctcaggtgatctgcccgctttggcctcccaaagtgctgggattacaggcatgaggcactgtgcccagcccacaaaatcttattttatgttaacctcttaggaccatgttcaaaccattgcccagaaaggaaaaggaactaacattaccatatgcctacagatccacatgctaggcttagttttatctaaattaagctgctcagataatattaaataggaggataaagatcaaagttcattacttgccagggagtttgagttgttaataatctgatatggaactcaaggaggaagaagacaaagctcatgctttgtcggcctttgaccccttcgatcagaatgcttagctcgtctcatttcctaagatcttcccaattagtcatagtacaaaatagaagagcagattcatttcacagcaagtattttattaatattgttcccttgctacattccaatagaattaaaacaaatattttatttgagatggaatctcgccctgtcgcccaggctggagtgcaatgacaccatcttggctcactgcaacccccacctcccaggttcaagtgattctcctgcctcagcctcctgagtagctgggattacaggcgtgcgccaccatgcctggctaatttttgtatctttagtagagacagggtttcaacatgttggccatggtgttgtttcataaaaatgcaggacagccaggcatggtggctcaagcctgtaatcccagcatttggggaggctgaagagggaggattgcttgagcccagaagttcgagaccagcctggatgacatagggaggccctgtctctacaaaaaatacaaaaaaaagtagccaggcatggtggtgtgtgcctgtagtcccagctacttggggaggctgaggcagggggatcacctggagcctaggaggttgaggctgcagtgagccgtgattgtgccacgcactctagcctgggtgacagagcaagatcctgtcccaaacaaccaaacaaacagaaaagatacagggcagcaaccaaaacatcaacaacctgttcccccagatagttcagcctctttgccccatctaggctagccccagagctgctcctgagtcagttcatgcctggctaattgactaaataagccaggacacagggctccagttgagacagctatgataagggatggcttagaatctagtcacctagattttttcacctctttgaattttttaggagagaaatggcaacaaaaaccattatgaggcatttgtttggaaaaccaacttctaaggggtggtcttagaaattcagcccaatctcataactactagcaatgaaaatcagtgtttaaaatgatccctgatatgctacaaacacaatattgagaagtcaggtataataatacataattgtgtcaggtgcggtggctcacgcttgctatcccaacattttgggaggctgaggcgggtggatcacgaggtcaggaggctaggcacagtgtagccaatatggtgaaaccctgtctctactaaaaatattttaaaaattagccgggcgtggtggtatgcacctgttgtcccagttactcaggaggctgaggcaggagaatcacttgaacccggaggcaggggttgcagtgagccgagattgtgccactgcactccagcctggacaacagagcaagactctgtctcaaataataatcatcatcataataatatattattattatttaataaacattctcagcaagagcatttcagtgaggtgtcattaattattcctttattcagaaaatgcagttactgctaccttctccatcctaggttttactgaaaatggcctgaaggagttatttttcttctatgttgaatgaatttatactatagagattatccatgtctggttttcttccttagaaaaaacatgaacattttattcctcataaaagacatgaatgttcaggtggacaaaaagaaaataataataaaagacagaatagcagccaagaaggtccatttatgtcctgagattccactttgaggaagtgttgcttcattccatcctttggttcctctttttttttttttttttttgagacaaggtctcacaccaatgccactggagtgcagtggtacgatcaccactcactgcagcctcaacctccctgggcccaggggatcctcctgcctcagcctctggagcagctgggactacagacatgtgccaccatgcccaactaattttttgtactttttgtagagttggggtttcaccatgttgcccaggct

SEQ ID NO: 97440 - DNA, 202814 bp, Homo sapiens
ttgtttgttgtggtgtctatagcaaagtttttctatcaattttcccccatcccatccccaccctggactcatttgagaagacttgagaaatgtcttaatactcacactgctgcatgtagctcttgcttatttactggtctgggaaacaggatgtgtttcctttttttaaaagccaattgacagattacacctaaatactcctccttttgtatcattcagccttttgttttagtttggtaagttttaagaaatttcagcagcaaagttgttattcagtgggcacgatggactccaaatgcctcaagttatgtatacctgtcccagatgtaaacttcattgtcctttgttggatgatattttaaatggatataaaataaattggtctaaagggctgccctccttgttgtgtttttaaattttagttaaaaactgctacagcttatgactttgtactttaagataattgtattgatcttttttcagattccttgtattttttaataaagtaatcttaaataaaactcagataggttaagtgttagaaattttaaacagcttacattgttagcgtaaagttatcttttcttttttcctaatcagagttcttgaccctttggttattgagtttaaaacttcaattgaaattcaatagtatttatttttgaaaaaaatcactaaactgtgcctaaagaacataactgccatattaatgttttggtttatatcctctatagtaatagaaaaacatttaatacttgtaatgctgatgtgttaatttgataccagttgagtagaatgtgatcaatccagtttacaatctatcatgagtattattaactaaaatctatgtgcttttcaataggaatcattcttctcttgctgtaacacttgaccttaacttttagaaagtgttcatttttaaactgcaactggaaaggttgaaaagttaggactcttgtatttgtgaactgtaatctgaagcagattatttaaagtgtagaaaaagaaacaagttcttcttttttgcaaaggtctgtgataccatatttcagctttgtgtaagtaatttgaatatccaaagggttgtgatgatcagttctgaatatgcaactgtccacttaataaggacaagtattccagtatctcttatgactgtagtcataaatgatgttggaatgtacattttgtgaaatagttggtatccctttactatgattaatttttgttattccaggaaatacttgtgaagccagccaattaataaagcactttagcatctgttcaggtagttttgaaaacccacttttccccttcaggataagaacttccaggttacctaaaaatgcaataaaaatctttatagtctaagcttcttggcatataatttttcatcagggttttcttttattaattgagcacaatactgttttgatttaatttttttccctcaaaccacccagctccttacatagtttttaattatatagctatatgaaagaggtggctaagacatttgctgcacacacttgaactaatgttgggtcagtagcttcgtgttactgccctgatcccagtgtaattcaggtggaaaggtatttttatctcacagggatatgtagctatgtattttactaattgtgaaacactggaaattaatgatgcagacaacttggtgtggtctttgaacagctctctgcagtatttttttttttcctgttaccataaattgtatttaagtgcttgctttccacttaagttgtactaatagaaccggtaactcccagccctccctgtttgacactccttagcttagattgatgtagttgtttttgttatccctataatgtgacttttatttttaagtcattgtgtactgcatttgtttgtcactagttgggcacgtgccaataatattctctccattccttatctgccatctctgttttgcctgatttctcttcaactgaataatggctttttgcatggaaaaaatagtttttactattagacgtgtaaagggaagagagagctaatgtattggactttgtgagcctacaaggaatattttggatccctccaataaataagggctatgtactatatgtactatatagagttatcatgtggtggaagatacttgcaagtcatagatttatgggcaggaggatttgttactccctatatctaggctgaatgtaaaatcccttatgttgtatcaatgggggtaaaaactatttttatttgcctatgatatacttggtttctaataaagtgccctaggctctagtgagaactgtctactttgaattgccatttactccctttcctcctttggccgatatgctcttggctagctttttataagttaatgtgtttccccaaaaagtttcactactttatattcatttgagtgtgatcctaaaacacctggatcaacagtacatctcatatgcaatctgcatcagctcctattctgtctggatgtctagaactgttggaagattttgacgtcttaagccctaggttttgctttgggaaataaggtttgaaatattgttcattgcattaagatttgtgtgtgtgtgctttgtaagcccagaaccaggttttggaaaatgcctgtactgtgaaagcaaattaggactctttctgagcctctttcattgtcagaaatagaatcactttccatcagcttccaggaaattgtgtatctggagtcgaagagatttgacatcaagaatccagatttttaaatgtaattgttttttaaatgctaatgtttgtaaagcaccttcagttcttcggatgaaaggtgctatattccctcagtgtaaattaataaaaagattacaggaagtttgtcaaaaaattcaatgcatagtctgtagtatgtcctgacaagaagttagcattttatataagaaattaaaaaatgcttattcctccacttggttgcttgactggtgaacaaaagtgaaacctttttttttttgttttgcatttgactctgagctaagtgttccaactctttaaaggcaatgtttattgttacaacctcgatccagtgcccagaactatgcttcatgagatcatcacaactctttaaattgtatatttacagtgtgtagtgatgctgacgaaatacacggtagtaaaccaaaaagaaacatttggaaagtcccctagcatgatgccagacacactagatgcttggggaaggttggttctgcattcccctcctgttttctatttccgtatcaatttattggtgaatttgtgccctcatgagagtaggcttatgctggcttagatcattcaaatgttttcttaattcaaaaatgcatgacatttatagatttgtgttgtcaacaaaaatactacataagtatattccactcaatccctaggcacccactatgctcagcagcactgtgcttttgtatataaatggtgggttataaaagactgcatggaggcattatggaatagcacaggctttgggatcagatctgggtgaaaaccccagctctgtcatgcagtaatagcaactaacctgtatacagcatatgtgctaaattgttatgttctctattttgtgatgcccttgctgtatgggtctatgactatattaccttttattttttttttttcttggtagagatggggtctccctatgttgcccgggctagtcttgaactcccggctgaagagatcctcctatctcggccttccaaagcactgggattacaagcataagctactgtgcccagcccaaacttcaaaaaaattaataaatcttgttcatccttctctagaacttttctccccctagatgaggaaataggcttagagaggataggtgacttgtctaacgttgcacaagagagctggaacttgaatccctagagggcacaccagagtatttctttagcgctctattttaagcaatattggttattgtagttgtgtgaccctgaacagattgaattttctgaatcttaagtttctgtgtctaaaataagagaatatcaggcagggttaatctcactattaaaaatagcacacacaaagcacccagtatctggtccaaagctgccttttattaagggctcatactcataggccatttgttcaaattcattgtagttgggaagaataatccaaggcaatgtataattgctaacatagtgtagattttgtaagtacaacacatctggacaaggaaatgtttgatgtaggatggagtaattggggaagataaagaggaagtgtgaattaagtgtggactggaatgatgggatttgtatgtcttacagagttaaaataagcagagatcacttggacacaatgtgaagactcgaggatcctttttgggaaggcgtaagaaatgaataggtcctgttttattgacaatatctgccatatatcagtgaggattggtcaattatggaagatgctaaaaagcaggcaatggatttttaataaggaatataataaatgtatttcaagattacttccctagtgagttgatgatcccccttcgtctgacacaaattattctcgagttctttcctctctctggcttgataatatgggtggaaactgttagttgagattgaggtgatttgtggttctgtgactttaggattacgtgaaatactaatttgggggaccaacagagatttgacattttttcaaagcaatttttcaattcctactacaatttaccgtcagtattacttcataaatggaaagtcattttaccattaaagatgtaggtaggaccatctcagaagaaaagacaactctttacaccaaatacatttggttttgtgaaaaactagtatcctaatttttgccgcttatggagatcaatgagagattttccccaccccaatgttgacatgtactactcgacgctgtcatattattgaggcataaaagatgttctaataaaatggaagtgacttaagagaaagttttatgcctcctcccaactctgaacagatgctgagaatataccaaacaagttcacacaggagtagagatttagagaggccttcccaccttcaagaattttataatacgttaatgagctgagtcttattttcaaggatggctttgttaaagcagaagaagggtaactatgcttatgaaaggcagttttgcatgcctgtttgtcaaaaaatacagtacaatttattttaaaattgattaattggtgtagaacttgcaatggtcacacaatcaggatggtcagcttccattcagggatcaaatttgtccaggcctttcaaaatggaacacgttgcttttagtatggcattggttctgtttgtagtgctgatttttctttcatggtaattaaaaaaaaatcttactttcttaaaagcctgcacccaagctagtgagcttttctgcagaggattgagcatccaaaccatgctttattttggtggattcttagagttttctggctgggtcctttttgaggggtagctgtgagctgtgagacaatttcagcaagatgtagggacaaggatcgcattcgaggtggcttaaaaggaaacacgtttgtgagagttgcctcactgtctcacctgctagaagaaattgggagatttcagggcttgttttcggtcctggcgtggtgcagaggtggaggggcgccagcaggtgtgtggtatgcaggacgcagagccaggagaacctggggcaggtgtctggagccgggggtgcagttcctacttttagacgcatggtggcgctagggtctcctccggccctgctagcaatctctaaggcacctccgccgccacctgcagtctcaaccaaacctctgggtgggcagcgcgggatgtgacgggccgagcgtccaatcgactgacagatttccgtccacactactgctctagccaatgggagccgaggagaggcgcggaggaggcgggccccgcggcaagcctggcagaggcgcgaggccctcctcccgcctctccgcctactccagcctccgccgcctcagcttcccgagcgagccctgcggccgccggagcagctcccgcggcggagcaggagccggatggtcagaggagcccggcagccccagcagccgcggagtcgcctggcccccaggtgcgggggctgggtggaggccggggttggggatggggtgggggccagggagcgggcccaggggcagcggctcggggcggtggagcattcggggcgcagagaccggaggggcggggggtgcaggctggggggaccttgggggcgcctgcaggcggcggcgcgggctgggcgcgatcgcctcctcgaggccaggtgagaggggcgtgtgagggaaggggcgccgaggggtgaggctggcggcgcggggccgggaggggcaaggcgggcgcgcccccggaggggccgtggaatgcgggggtcgccgggcccggagaggcggggcgtggagggggcagtgcacggtcgggaacgggtgggcacaggaaaggggaggctaggggggcttgcgggggtgacgaggcagacaatgagtaggtggaggtgggtgattttggggagctgggctgtgacgagcaggggtcgaggatggggtgagggaccaggaaggtttgagctcagggggaattgggggaacggtgagtcccaggaatgctaggtcttggtaaataggggaaacagggcatgaggcgtttgtaaggtcagatctgggcttggcgagcctgtggtcccagagggtggtctatttagttcttgactggcacggtagcgccgggagatgttttcttgtatgttacttttagttaccgtcttatttgtttggtctgcagactgactggcacagtggagaaaccgcctcgaaaacggagaagcaggtaaggcagtgccttcctattttgcttcatgtttttctttttgcttggctgcacctgtgccgtactgcataattgtatactgtcagtagatgaagtttcttatttatcccccttttaaaagaatataaccacatgcatgatttttcttttgaggacttcaaattactacctstacagtcgattttttttttcttggtatctaagataatgtgggaaatcttgagaaatcctacttttttactttttgatgttgtgtaaggatctcagctatttttttttttaaccttagccataatttcattttctccagcatctctgtttaaaaagctcatcttggctggggtggctcatgccttcaatcccagctctttgggaggctgaggcaggaggatcatttgagcctgggagttcaagaccagtctgggcaacagagcaagactccgtctctacaaaaaattgaaaaactagccggtcccataaatatatacacctactatgtacccacaaaaacaaaaaattaaaaaaacaaaaaccaactagctgagcgggtgttgtggacctgtagtcccagcttctcaagaggctgaggtgggaggattgcttgagcccaggaagtcaaggctgcagtgatgcagtgagcygtgatcatgccactgcactccagtgtggggaacacagcaagaccctgcctcaaaaaataaactaattttattgagcatctactatgtgccaagtactgtgtacgaatgctctatgtgtatcttctcctgtaatcctcaaagaaccctaagagaatatgtagtgtcactattttacagaagagggaactgcgacacagagaggccaaatatttacccaaaatcatgcatctagtaaaagataaaaccaggatttgaatccagacagtctgactccagagcttaagctcttaactgttataccataatgctgctaataaatatgcaattgaaagtaggttttcttattgctttatcttttgtcgttggacactgtgtagttaactcgaatggttgaaccttaggaaaatagaagcaaagagtttaagtagtccacaaacaaagtgaattagtccttgagtaatggagatgaagatatatttatcacataaacatttttgactgcattccatgtgagaggtactacatagcaattctgtgtagtcattagatgattcctttttcacagatgttggcattgacctagagaaagtaagctactgtagttatgtgaccagtaggactactttcatagttaatatctggcaagttaatgatgttaatacacagaaaacctcaatagtaaatagacacgaaaygctgatggtggaagtgccaacagagtttccttgtcacactttaggcctgtactgtccaatccagtaaccatatgcagggtgagcactcaaaatgcatctagcatgactgaggaactaaatttttaattttatttaattgtaattaaattaacttgagaaactgctacttgatcasctattggaaaacgttcaagtatgttttgaacaacttgggtatgtgagtctgtatttttcatccgtcattttatgaaatctaagtatatatcaaatatttccaatgagaatttagggtctgaaatgagataagtataaaatacatgctagatttcaagttagtacaaaaattgaataaataaaatttctcagtaactttttatattgatgacatagtgagayaatattttaggtatattggagtaaatacttttttttttttttgagacagggtctggctctgtcatccaggctgtagtgcagtggtgcaatctcagcatactgcaacctccacctcctgggctcaagccacccagccaattcagcctctggagtagctgggactacargcgcctgacacctcacccagctcttttttttttttttttttttgtagagacaaggtttggccatgttgcccaggctggtctcaaactcctgggctcaaatgatccaaccaccttggcctactaaagtgctgtgattacaagtgtgagctgccatgcctggctgtaaataaaattgttactaaaattattttcacttactttttcctgagacaaagtcttactttgttgcccgtactggagtgcagtgatgtgatcttgactcactgcaatctccgcctcctgggttcaagcaattctctttcctcagcctcccgattagctgggattacaggcgcctgccaccatgcccggctaatttttgtatttttagtagagacggggtttcaacatgttggccaggctggtcttgaactcctggcctcaagtgctctgtctgactaggcctcccaaagtgctgggattacaggtgtgagccaccgggcctggccttcacttacttctttttcctttttattttycttctgagacagggcttggctctgttgtcaaggctgaagtgaagtggtgcaatcacagctcactgcagcctcgacctggtaatccttccacctcagcctcccaagtacctgggactacagatgtgcaccaccatgccaggctaactttttattttttgtaagagacagggtctcactgtgttgctcaggctggtctcctgtgctcaagtgatgcgccagccttggcctcccaaagtgctaggattacaggcgtgagccaccatacccagcctttctttttattttttctaatatggctactagaaaattaaaagctgcatacatttaacttgcattgtatttctttgcattgtatttcttttggatagctctcatttaactctcattaccccactgccagactcttcagtagccttctgactggtttccctaccttgaatctgtaattccctccctgtactgtgcaaatcgatcttgtaattctcatgcttaggatccctctgtgcttcctcattgcttattgaacatcattcagacttttagcctaatcatataaaaaaattgcctttattttacttcttcatactttcccagccacggttaatactttggccatatcgattttcaatgatggaactattaaatgtctacttttaaatgatttaactttctggtgaaccttcaagatgaattaattgctgaatgtaactccgtgctccatttgccattcccagaacttatgttccctctttgctttggttttttgtttttagggtttttgttgtttttgttgttgttgttgttgttttttaaagacggtctcacttcagggtggagtgcaatggtgtgacaatggctcactggagccttgacttctcgggcccaggtgattttcccacctcagcctcccaagtagctgggactacagatgtgcatcactatgcccagctaatttttgcattttttgtagaggtggggttttaccatgttgctcaggctggtcgtgaactcctgggcttaagctatctgccttcctcagactctcaaagtgtttgaattataggcgtcagccacagtacctggtctgctttgggtttttgtatgtgatttctttttctttctggagtactttctccttgctccttgacaagccccctcctttaagactttgctcagtgagggcttccccccaccctccctctgctccaccttattgggtcccatcatggcctgtacatacacttacatgaaatggtctgggctgaatttgaattcagctctgtcaaatgtagtttgcgagatcatgtgcaagttaataagcctgtctctgcctcagtttcctcatctatatagtagaaataatagttctgctggcgtggtggctcacgcccgtaatcccagcactttgggaggtcaaggtgggcagatcacctgaggtcgggagtttgagaccagcctgaccaacatggagaaaccccatttctattaaaaatacaaaattgggccgggcacgatggctcaatcctgtaatcccagcactttgggaggccaaggcgggcggatcacaaggtcaggagatcgagaccatcctggctaacacagtgaaaccacgtctctactaaaaacaaaaaaaatcagctggacgtggtggcaggtgcctgtagtcccagctactcaggaggctgaggcaggagaatgacgtgaacccgggaggcaaagcttgcagtgagctgagctcataccactgcactccagcctgggcgacagcgagactccgcctcaaaaaaaaaaaattggctgggcgtggtagcgcatgtctgtaatcccagctactcgggaggctgaggcaggagaatcgcttggacccaggaagtggaggttgcagtgagccgagattgcaccattgcactccatcctgggcaacaagagcgaaactctgtctccaaaaaaaaaaaaaaaaaaaaaagaaataatagttcgacttccccaaggttgtaaggtgcctaggatagtgcctggcacatagaaggtacacaataaattttaggttaaaaaacacccatcaaatatcttttatttcccacttcttttcaaaatgagaagattaaaaataaaggccaagaagaaatgaaagaagcagataaagccagtggcagaattagtgcatggaccggaaagtcctgcatcattgctaatggttgctttggtgtttggctctgagttttctggagtaaaatgaagaagaaaataaagttcagttttcagattcatggtatctctaaaatcaaacgtgagtttttaaagattgcttcttggccaagcgtggtggctcacatctgtaatcccagcactttgggaggctgaggcgggtggatcacctgaggtcaggagtttgagaccagcctggccaacatgacgaaaccccatctctactaaaaatacaaaaaattagccgggcatggtggcgcgtgcctgtaatcacaggtactcaggaggctgaggccagagaatctcttgaacctgggaggtggaggttgcggtgagctgagattgcaccactgcactccagcctgggcaacagagtgagactccgtcttaaataaataaataaagattgcttcttatacttctcaatccaagtgagttattgccagtgaacagtctccacggggccaaagcaatgtggttttggtatatggctctctgatggtttggcttgattcagaggtaaagagggatgcgtacactgtggggactatacgtgttttgttcactgtttatccccagcagctagaatagcatctggcacgtagagaacagtttattgaatttttgagtgaacaaatcctttagtaattctccaggaatttaagtaagcatcaggttgcaatgagtttattttctcagtccagaatcatgaggctacatattcagcatgcctgatttaggttagatcctgatcatgtcagcattttgacctgaatggacaaccagcacatgtatttaaaggtcctatgggcaggaccaagattttcctcagaaaacagtgcaggggttgctctaaaactagaaaacaaaatgtacagttaagaccccaaagatgaattatagaataaggatgtaatggttgtagccagatatttaaaaaaataggtgttaggccgggcgcggtggctcacacctgtcatcccagcactttgggaggccgaggcgggtggatcacaaggtcaggagttcaagaccagcctgaccaagatggtgaaaccccatctctaaaaaatacaaaaattagtcaggcacaatggcgcatgcctgtaatcccagttacttgcgaggctgaggcaggagaatcacttgaacctgggagaaggttgcagtgagccgagatcgctgcactctagcctgggtgacagagcaagacttcgtctcaaaaaaaaaaaaaaaaagtggtattagttgccgggcatgctggctcacacctgtaatcccagcactttgggaggcccaggctggcagatcacgaggtcaggagtttgagaccagtctggccaatgtagcgaaaccccgtctctactaaaagtacaaaaattagccgggcgtggtggcaggcagctgtaatcctagctactcaggaggctggggcgggagaatcgcttcaacctgggaggcagaggttgcagtgagctgagaccacgccattgcactccagcctgggcgacaaagcgagactccatctcaaaaaaaaaaaaaaaaaaaaaagaaaggtattagtatcagttttatactgtggctatagaaattctgaatatcaaatgatataaattcctggtaaacacttcaagatgaattaattgaggcagatgaatggtgtgagcccaggagttcaagaccagtctgggcaacatggtgaaacctcatctctaccaaaaatacgaaaattagccaggtgtggtggtacacacctgtagtcccagctagttgggaggctgaggtgggaggatcagctgagactgggaggtggaggctgcagtgagccatgattgcaccactgcactccagcctgggcaacagtgaaaacctgtctcaaaaaaaaaaaaaaaggtaagttaattgttgaatgtagccttgagtaactgattgaacgggtctgctatgtagagttgttgacagttatattacatatgtagtacattttagaaaacagttgacagaattatggttttttttttgttttttttttttttgtttgagatggagttttgcttgttgaccaggctggagtgcaatggtgtgatctcggctcactgcagcctctgcctcctgggttcaagtgatcctcctgcctcagcctcctgagtagctgggattacagacatgcgccaccacacccagctaattttgtatttttagtagagatggggtttctccatgttcgttaggctggtcttgaattcctgacctccggtgatccgtccgccttggcctcccaaagtgctgggattacaggcatgagccaccatgcccagcccagaattaggattttaaaaatttttatttagttttgagatggagtctcactctgtttcccagaccggagtgcagtcatgctatctcggttcacagcaacctctgcctcctgggttcaagtggttcttgtgcctctgcctcctgaatacctgagattacaggggcgcaccaccatgcccagctaattttttctgtttttagtagaggcggggtttccccatggtggctaggctgatctcgaactcctggcctcaattgatccgcctgccttggcctcccaaagtgctgggattacaggcgtgagccatcgtgcctggcctaaaattatgatttttattttaggatattgatgttaaataattctttttgataggtgttagttagtggctgagttatcttttgagaacatttctagtgcagaccaaactgtaagacagtttaagaaaaacaaagacagtttgagataagaacctcatgcattattatttctttgtatctttttccccttaaaacttttatttccttatcatagttcatctttgcacccttataaggtactaagggggagctcagtaaaactagtgaaccaataaatgaattggtggcaagaggagttagtgtgggatgggtttggttgtccaaaataatgtgatactatttaatgcccctgaaaaactgcaatggactgaaaggagttttaagattaggaaactggccgggcgtggtggctcatgcctgtaatctcagcattttgggaggctgaggcgggcggatcacctaaggctggaagttcaagaccagcctgaccaacatggagaaaccccgtctctactaaaaatacaaaattagcctggcgtggtggcgcatgcctgtaatcccagctactcaggaggctgaggcaggagaatcgctggaaactgggaggcggaggttgcagagagccgagatcgtgccattgcactctagcctgggcaacaagagcgaaactccatctcacacacacacaaaaaagattaggaaacttggtctctatgtgcttttggaaaattctgaagagtccaatatgtctgttaatgatgtttgggttatgagttggagaatcctttctggtcctattaggaacaagatccatttgtttggataggattcacattgatgaaagctttactgtatgatttgggggcttttgttgttgttgttgttgttacatatttaaagcaaagagatccgggcattttgttgttgtatgtaatttgtttaagaaacatttgaatgctttctagttctgggttctagggatatagatatgagtgaggtggccgttgttggggaaaatctcatgtattaatgggaagacagacactgaaatatgagacagtgtaatgactttgtatatatacaaaggtttacacagtacatacaaagggtttataggaattctgcatagtggtagtgagggcagtttctgcagtcatttatctaagccctgaaggtttagaaggttaatttgttggtagtgtgactattgaaatgacaagagatgacagcctagatgtagactgactaataatgaggtcttgggtgaactaaattcaggacctgaaccaagatagtgccagaagtggaaagaaagatgtttttaagagcttgggctgtggtgtcagactaaggggtggttctcaactaagggggttttgcctcctaagggacatttgagaatgtctggagacattttgggttgttacaacttggagcacctagtgagtagaggccagatatactgctacacatcctaaaatgcatgggacagcatcctaatctaagagttccccagctcaaaatgtcattagttctgaggctgagaaatcttgcattagagtttgaatcctagcccttccaaatgtcctcaccaatacttggtcttgtgattctttcttttttttttgttttttgaacaggtctgtagaggtacagttggcatacagtgagctgtacatatttgaagtgtacaatttgataagttttgaaatacatgtatacccttaaaaccaccaccattgtttgccattctgtgggtgtacactggtacgtgtcattgtggttttcatttgcctttccctgatgactgataatgttgagtatcttttcatgtgctaatttgccattcatataacttagtgaagtatccaaatcttttgctcactttttgtcagttgtttgtcttcttacatagttgtaagagttctttatgtattctaaaaacaaaatttaaaaaagcaaaatcttttttttttgtttttgagacgaagtctcactttatcacccaggctggagtgcagtggtgtgatctcatttcactgcaccctccgcctcccaggttcaagtgattctcctgcctcagcctctgtaggagctgcgattaaggcgcctgctaccacacccggtgaatttttgtatttttagtagagctggggtttcgccatgttgcctaggctggtctcgaactcctgacctcaagtgatctgcccacagcggcctcccaaagtgctaggattacaggtgtcagccactgtgcctggccacaaattcattattaggtatgtgttttgcttatgttttctcccatgtatggcttgccttttacttttctccacagtatcttgagatgcttgcagcttgaataataggttggatgggaatgcttttatttatttatttatttgtgagatggagtctcactctgttgcccaggctggagtgcagtggtgcgatcttggcttactgcaacctctgcctcccaagttcaagtgattctcctgcctcagcctcctgagtagctgggattacaggcgcgtgccaccatgcctggctaatttgtatttttagtagagatggggtttcaccatgttggtcaggctgctcttgaactcctgtcctcgtgatctgcctgccttggcctcccaaagtgctgggattacaggcatgagccaccgcaccagcctgagaatgcttttaattgagacagcagacacaggagcaagagcaagtttgggacggtaagaacatgagtttattttggctatatggagcgtaaggtgcttcaatgaactgtctttaaccaggcggttaaaaatatgggtgttttgcagagaagcaagataacggcttcaggtatagattttaaagcattcagcaaacacgtggtgatccaagtcatgcaaatgaatggaatggatcattggctcattgatccattggatcacacctgtaatccaatggctggatgcagtggctcacacctgtaatcccagcactttggacggccgaggtgggtgggtcatgaggtcaggagtttgagaccagcctggctaacgtgatgaaaccctttctctactagaaatacaaaaactagccaggcgtggtggtacgtgcctgtaatcccagctactcaggaggctgaggcaggagaattgcttaaacccaggagctggtggttgcagtgagccaagatcgtgccactgcaccctaacctgggtgacagagcatgacgctgtctcaaaaaaaaaaaaaaggaaaaaagaaaagaaaatgaatgggataacctagcgaaagcatgttgagtgaaatgcaaagaaatagaacgtacagtaacacggtgtaaaaatagaccaaactgctttctgtcttttgggtgttatctctttctctgcagtgttaatctgtccactgcagggtatttctgtaggtagccgtcagacaggtagtgtttatctccaggagtttagatctctgtactctttgctgagaaacaggttctgaaggtagtttcttggaaaactagaacatttttctaatctacactgaaacacaggactattctagagttacagagctcatggtaggtttgcctcagcaacatccgtacagcaaatgcagtggttttggtaaagccatttcttgtagcatggtcagtgaaatcctagggcataaagctaaaattcagttctgtgaaagcagactctgcagggccaagatagcatggtcagtgtatgcagcattttcacggtaatattttactcaagaatgaaacctagaagagttaagcagtgattttcaagggcattcaaaaagagctcataggtcctgtgggactcattcaagggcttcctggagggtagagtgccaggagttgccagagggaggttaacaagcctagcctcaggcgctactcctatattttatatatgtatatatgtttatttttcttttttttttttttttgagacggatcttgctctgttgcccaggctggagtgcagtggcacaatctcggctcactgcaacctccgcctcccgggttccagcgattctccctcctcagcctcccaagtagctgggattactggtatctcccatcatgcctggctaattttttttgtatttttgtagagatggggtttcaccatgttggccaggctggtgttgaactcctgaccttaggtgatccacccgcctcggcctcccaaagtgtttggattacaggcgtgagccactgcgcccagtgctaataattttttaaaaaaatatctgtttgttagctggatgtggtgttcttgcacctgtagtcccagtcccaggtatttgggaggccgaggtaggagcatcacttgagcccaggagtgagttaatgcccagcctgcacaatatagtgagacctctgtctccaaaaaaaaaaaaaaaaaaaaaaaaaagcggttcaaaccaagatccagataaggttcataacttgtaattagttgagtagctcttgaagtcttttttagtctatagcttttccactcattttttcctgtactatttattttttgaagaaagcatgttcgttattaagagttttccagtcttggccgggcacagtgggtcacacctgtaatcccagtactttgggaggctgaggcgggcagatcatgaggtcaggtctctactaaaagacaaaaaaaaaaaaaattagccgggattggtggtgtgcagctgtagtcctagctacccaggaggctgagtcaggggaatcgctccaacccgggaggtagaggttgcagtgaactgagattgtgccactgcactccagcctggcaacagagccagactccatctcaaagaaaaaaaaaagaggttttcagtctgaatttttaatttttaaaaaagttggtatataatttacatagggtgaaattcacctgttttagttctttgaattttgacgaacctagttgtgtaatcacaactataatcataatatagaacagttccatcactccccaaaattcccttctgtccccccgaccaattggcaaccactgaccagtttttccacagtctgaattttgctgactttatgacctcatggtatcacttagcatgcttctctgttccgtttgtgtcttgtaaattgatagagttaatttgcttttttgttttaagaatgctttggctggacgtggtggctcatgcctgtaatcccagcactttggaaggccgaggcgggcggatcacctgaggtcaggagttcgaaaccagcctggccaacatggcaaaaccccgtctctactaaaaatacaaaaattagctgggcgtggtggtgggcgcctataatcccagctactcgggtggctgaggcaggagaatcgcttgaacccaggaggtggaggttgcagtgagccgagatagcattacggcactccaccctgggcaacagagcaagactccatctcaamaaaaaaaaagaaaagaaaagaaaaactgcagcatagaagtgatgtgaactttcattaaagcttctcttttttatgttaggaacccatagtaatcggtatctagatttatgaattcattagggttgcaaatgttgaaattctaattgttttgcccatgcgtggtggctcacacctgtaatcccagcactttgggaggctgaggctggtggatcacctgaggacaggagttcaagaccagcctggccaacatggtgaaaccccatctctattgaaaatacaaaaatcagccaggtgtggtggcacgtgcctgtaatcccatctacttggtaggctgatgcaggagaatcacttgaacccgggaggtggaggttgcagtgagccaagatcatgccactgcactccagcctgggtgacagagtgaggctctgtctcaaaaaaaaaaaaaaaaaaaaaaaaaaagaaattctaattctttcattccttctttttatttattttttttaagttggagtctgcgtgatctcggctcactgcaacctccgccccctgggttcaagcgattctcctgcctcagccaactgagtagttaggattacaggcgtgcaccaccactcctggctaacttttgtatttttagtagagacggggtttcaccatgttaaccaggctggtctggaactcctgacctcaagtgatcggctcgcctcagcctctcaaagtgctaggattacaggcgtgagtgccactgtgcctgtctcattccctcttcattattagctggaatacttccagaaagagacatttcccttactgactgaaacaattttttgaattttatttatttatatatgagagggagttttgctcttgttgcttaggctggagtgcaatggcgtgatctcggtgcactgaagtctccgcctcctggattcaagcgattctcctgcctcagtctcccgaatagctgggattaaagttgtgcaccaccacacccagcaaatttttatatttttagtaaggatggggtttctccatgttggccaggctggtcgtgaactcctgacctcaggtgatagacctgcctcagactcccaaaatgctgggattacaggcgtgagccactgtgcccggcctgaattcaattatttatttwttttttttgagacggagtttcgctctgtcgcccaggctggagtgcagtggcacaatctcggctcactgcaagctctgcctcctgggttcatgctattctcctgcctcagcctcccaagcagctgggaccacaggcacacaccaccacacccggctaattttttgtatttttagtagagacggcatttcactgtgttagccaggatggtctcgatctcctgacctcgtgatccacccgcctcggactcccaaagtgctgggattacaggcgtgagccacagcgcctggccatttttgtatttttaatagagatggggtttcaccatgttggccaggctggtctcgaactcctgacctaaggtgatccacctgcctcagctccacaaagtgctgggattacaagtgtgggccaccgcacccggccaaattacccgtatacattttagagaagggggtcttgctctgttgcccaggctggagggcagtgccacagtcacagcttacagcaccttgaacgcctgggctcaagcagtcctcccacctcaacctcctgagtagctggtgccatgtgccactgtgcccggcaggttttttatttttaaaaattgtttgtattgatgggtgtctcactttgttacccaggctggttgcaaatttctggcctcaagcaatccttctgccccagcctcccaaagttctggaattatagctgtgagccactcactgcacctggcctagaattttttttttttttgagatgcagtctcactctgttggccaggctggagtgcagtggtgtgatctcagctcactgagacttccacctcctgggttcaagcaattcccctgtctcagcctcccgagtagctgggactacaggaacgcaccaccatatctggctaatttttgtatttttaatagagacagagttttgccatgttggccaggctggtctcaaactcctgacctcagttgatccacccacctctgcctcccaaagtgctgggattacaggcgtgtgccacctcgttcggccggaaaaatcttaaatggagcagcttgtttggaactttctttgaaaccaccaatattacttatttgcaaaagatatccataggttagtacattaattgactgtatagcacatatgaatcttacctcatgaaatcaggtaagcaaaaagtattaacaatattttaattcctttaaatgaaatcaaattctgcccttgggggcaggtgtggtggctcgtacctgtaaccccagcactttgggattctgaggtgagagsgtagtttgagctcagactagcctgggcaacataatgagaaccygtctcaaaaaaaaaaaaaaaaattctgccctgggaccttctccccctcaattctaccaaactggttagaaatacaatctcagtgattaataatagagatccacccctccttagagttatgtgagactctaataggcttttgaggtaccaggagaagggtggaaggttgattttcagcctgtgctggatgtgactgagcacattgtctaagaggatatgaggcgttgaagcctggggattctgatgtacaggcttcagctttgcttggtacaacacatgcccatttctctctgaggacttgggcactgctaggacgtggggttgcaggttccctttttgtggattctgaaggaattccttcttctcagataaattgctcccatttttcttcttatttctacctaacccccagctcccgccaaaggcactcattgttctacccttcttccctcagtataatctcctcaaggagttcatattttcagaaaacatgcacaaacctcccttgaggcaaagaagcaaataggactatcatcttggggattgggaagtaccatgataataaaacatccattgatgtcttaataacttatctggctacttatattttcatcagtaattctagtccctgtagtgggacttaatgatctatccaaaaatgatttgattttcccttctttaaaagatggagctgaattctcctcccttgagtgtgggctggacttagcgatgcacttctagtgaatagaacacaggagaagtgatgagatgtctcttcccagattgggtttttaaaagactggtttctgccttgcatgtgtgttctctctctctctctcacacacacacacacacacacacccacacccacccacccacctcactttgcgggaggctagctggctagctcagattgggttttaaaaaaactggcttctgccttgcatgtgtgttctgtctctctctctctgacttctgccttgcatgtgtgttctctctctctctcacacacacacacacacacacacacacacacccccaactcactttgggggaggctaactccatggtatgaggcagcactgcatagagggaaggcacttgccatgttgtgaagacagccacccaggcagcccatggggagggccatgtggtgaggaagtgaggcctgccagcaaccacaacagctagcttggatgtagatcttctgaggcctgctggcagccacatgactggctcagaaaagtgagcttgaacagggatcctcctactctagttgagccttgaggatgactatagtccaagccaacagcttgactcattgtcctggcttcacaagggctgagttatgtgaatctgtgattttccttggagagtctcctttcttccagcactggcttcattgtacccaaggggctcaatgtccagctaagatttctcttatcctgtataggtttctgatggacaaagagagagaatgtgtgtgtgtgtgtgtgtgtgtgtgtgtgtgtgtgtgtacgtgtacgcacgcatgcatgagagagagaatatgtgtgtgtgttttggaagcagctatcttttttttttttttttttgagacaaagtctttactctgtcgcccaggctggagtgtagtggcgtgatcttggctcactgcaacctccgcctcccaggttcaagtgattctcctgcctgagccccttgagtagctgggattacagtgcctgccaccatgcgtggctgatttttttgtattttttgtagacacagggttttgtcatgttggccaggctgatctcaaactcctgaccttaggtgattcacccaccttggccttaagaagcagatatcttttgattaaagggcagttcagttttatttttctttcttttttttttggagatggagtatcactctgttgcccagactggagtggagtggcacgatcttggctcactgcaacctccacctcttgggttcaagcaattctcctctctcagccacctgagtagctaggattacaggcatgtgccactacacctggctaattttgtatctttagtagagacagggtttcaccatgttggccagcctagtctggatcctgacctcatgatcctcccacctcggccactcaaagtgctgggattacaggcgtgagacaccgcgcctggccttcatttttaaatttaattttattttttttaagacagagtttcgctctgtctctcaggctggagtgcagtggcgccatctcagctcactgcaacttccacctcccggatttaagcgattctcctgcctcagcctcctgagtagctgggactacaggtgtgcgccaccatgcctggttaatttttgtattttttatacagacggtgttttgccatgttgaccaggctggtctggaacccctgacctcaggtgatctgcccaccttggcctcccaaagtgttgggattacaggcgtgagcctcccacacagattgggaggtagtcctctgctcttgtttgccttgttaagggaagggccgtaaggtagttatccagtgaagagtcagttttcttctgcctgctctctctcaccaggctttaaactctttttcaaccccttttcttggctttttgggaagagtgggcaaaatagagccaagtcagttatgatggttcattttatgtgtcaacttgactgggccactgagtgcccagacatttggtcaaacattatcttaggtgtgtctgtgaggatgtttctggatgaaattaatatttgaagtgattgagtaaaacrgatacccttccgagtctgggtgagcctcatccaatcatttgaagacctggctagaacaaaaagactgagcaagagggagcttctcctgcctgactccttgagctgggacatcagtgttttcctgcctttggacttgaaccaaaactttggctcttgagcatggtagctgttgtattggaacttgcgccattgattcccttggttctcaggcctttagacttggactgcaactagaccataggctctcttgggtctctagcttactgactgacaatcttgggacttttcagcctccataattgcatgagccaattccttttaataaatatctttttaaatatatatacctctgtctctgtctctctacctctacctctgtctctctcctgttgattctgtttctctggagagccctgactaatatataagcctagtcttttattgccttacttttgtctcatttcaggtttttcagagtgctcctaatctctgagaacttctgcattactggcttaattctctgcattgacgcagtctgtcatgaaatggctatcttcatgacaaaccaagcaaaaggagaggtgcttgggttttcataaacttggcagctgttttggaaacattttactctaaggctaggcaccactgtttgtattcttattttgcatttggggtttctttctcctaagttctctctccatatattctcctggcctggaaggcatgtgtgcctgtttgacagtgtcctggaaattcttttctagacggggagtgcatgttgaaggtgctcacacgtggtttcctaaaatcctgcaaagtgrcagttaggacttttgtttgtttgtttgtttctttgtttctttgagacggagtctcactctcgcccaggctggagtgcagtggcgtgatctcggctcactgcaacctctgcctctcgggttcaagcgattctcctgcctcagcctcccaagtagctgagattmcaggtgcccgccaccatgcccggctaattttttgtatttttagtagagacggggtttcacgtgttagctaggatgttctcgatctcctgacctcgtgatccacctgcctcggcctcccgaagtgctgggattacaggcgtgagccaccacacccggcctgccagttaggacttttaaactcttaggataatttccaaactatagagtcatcatgtatagattttcagagaacaactgccaaaaataaagattttagatttagaattgttgacataagcctttttttttttgagttggagtctcactctcttggccagtctggagtgtagtggtgcaatctcagcccactgcaacctccatctccccagttcaggcaattctcctgcctcagcctcccgagttgctgggactacaggcacgtgccaccacacctggctgattttttgtagttttattagagacagagttttaccatgtctctcaggctggtcttgaactcctgagcacaggcaatctgcctaccttggcctcccagagtgctaggattgcaagtgtgagccactgagcctgtcgtagcctgtctttctaacaatagataagcaagctgtttttctattgaggtaacacctggctggtgataataaaattgtcatcaagtaaaaggattcttacttttgtataaaataggaatatgcatstatatgtccaaaacagktttttaaaattttactaatttatttatttttgagacagggtctcactccagtcacctgggctgcaatgcggtggtgcgatcttggctcactgcagccttgacttactgggatggagtaatcctcccaccctagcctctgaagtagctgggaccactgtcacataccactacgcccagaaaattttttgtatttttggtagagacagggctttgccatgttgtccaggctggtctcgaactcctgggctcaagcaatccacccgcctcggcctcccaaagtgttgggattactggcgtgagccactgcacagtgcacaaccagcttttttttttttttttttttttttttgagatggagtctcactctgttgcccaggctggagtgcagtagcgcaatcttggttcactgcaacctctgcctcctgggttcaagtgattctcctgcctcagcctcctgagtagctaggattacaggagtctgccaccacacctggatactttttgtatttttagtagagatggagtttcaccatcttggccaggctggtcttgaactcctgacctcgtggtccacccgcctcgacctcccaaagtgctgggatcataggcatgagccaccgtgcctggcccacaaccagttttaaatcattaagatataagttaaaaagaagaggaaaatgttttaaataatttataagagaattatagaatctgtattgagagactactcagtccaaccgaaagcatagtaggagaaatcctagtgtaatcacattcctgaaaatgaagtccttaaaaatttcttagtcttagtcttttcacatatagttcacttacatatttaccaatgacatacatgtatttagtgtttcctaagaattttatccaaattgcctgtctcatgtacatgctgttgtatataaatgcccttgtgacaaaatacaaataacatttcgtagaggtgtcagtgaaattgtgatacttctgtcattgattttttcaataactagatgataaaatcacagttgtcatatagatgttcatagcatttttactctttattttttatttatttatttttttgagactgagtcttgctctgttgcccaggctggagtgcagtggcatgatctcccggctcattgcaacctctacctcccaggttcaagcaattctcatgcctcagcctcccaagtggctgggactacaggggtgtgccaccatgcctggctaatttttgtgttcttttagtagagatggggtttcaccatgttggccaggctggtctcaaactcctgacctcaggtgatctacccatcttggcctctcaaagtgctgggattacaggcttgagccaccatgtccagcctggatttttactcttaaaaaaaggttcttatgtttgaaaatgttggaaaccactagattaaattatctctggagccagttctagccatttccaaagtggaaaaggactttggcttaagggtggagcctttgcataaggatgtgttcaaagaggatagtacagcatgctggtgacacccccagagctttggcaggtttctagtcactacttttctttgtctttctttttaaattcctacatgccccagaggtttgattcatcttttttccagcatctcgtatgtcatctattgttctctccacccataaaccctcaactgaaacaggatgcaggtggcttagctttttctttaccttgttcacgctgaaactatttgacactatttcacttttaaggatttttactgctgttaacaacagagaatgaaatgaatgaatacaaatttgcacaatttagaattttattaaaaatgagaatttcttatccttcattgaaatgtaaacaaaaaaatttcagttttttagtagttgctaggataatggcagtagactaagtggtgtcaaaagtttcttccaactctgtatttaatttttagtggcagattactcatgtttccttattttatcactcttttttttctgggaagtccctaaatgtcctctctcctatttttctttttctttttttgagatgaagtcttactctgtcactcaggctggagtgcagtggcatgatcttggcacactgcagcctctacctcctgggttcaagcagtcaagcgatcctcctgccttagcctcctgagtagctggaactacaggcgtatgccaccatgccaggctaattttttatacttatttatttgtttgtttgtttgagatggagtcttgttctgttgtccaggctagagtgcagtggtgcgatctcagttcactgcaacctctgcctcctgggttcaagtgattctcctgcctcagcctcccgagtagctgggattacaggcgcctgccaccatgtctggctaatttttgtatttttagtagagacgggatttctccatgttggccaggctggtctcgaactcctgacctcaggtgattcacccaccttggcctcccaaagtgctgggactgcaggcgtgagccactgcgcctggctcttcctcctgtttttctttatcatttgactctgaggataattacttgtaggccattgaattcatttcatcatggggaggagaaactccaggttattgtctttaatctctttactccttgttttttacaggaaaactctacttaataaaaaccaataaatactattaacaaaaagtcaactttggtatattctggcatacaaccaatgtattggtatgacagattgtatttgccaaatgtgtctacagcagtatcgttcattttacatgttctacctacaatgtcatcttcacactcctcccatctagtggtgaagcctgtgtctcagtctcttaaccagagcagacttttgtaaatgcctttaccagtagagcatggctcaaacgacgtgtcacgtttagggctaggttataaaaatgccatggatttctaactttctctctggagtgtcacttttggaatctggctactatgtgaggagcccaagcaactaggagtggcctgtgtaagagggaaactgaagctcctgactctcagccccagctgagctcccagctgacatctgggatcagcttgccagccatgtgagtgagctgtcctaaaagcagatcctaatcttctagttccccatcacagtgccctaatgagtgcttatgtagtgtttatatgtagagcagagatgagttgttcctgtcaaactctacccaaattgcagattcatgagcacaataaaagattgttttaagccactaagttatgtagcaggggataactggattagcattccattttgccggagtttagagatcatactatacgttgaactgtaagaacaagaacaagatrtatttctaccttcaggagcactgttagttttataagagaagaaatatggattatgtgtccccttcctttatagattgttatttcactgtctttcattttacatatttattaaattattattttttttaactaaagagcagtacaaaacaagaaatcaaatattggacaacaatattgctgcctagataactccattttcatgtacttctagtttagaaggttgtgtgcatgttaataagcagtgacttcggaatgattcagaccacatgtgtgaccgtgaaggcagtatcctctttgtaaatcagttgatctataaaatggtatgtacttcatgggtttgctttgagacttcaatgatattacctgccacaaaatattggctgttcattactactgctcccccatcccccgccaacaatagagatgggatcttggtcttgtcatgttgcccaggctggtcttcaatttgtgggcttaggtaatcctcctgccttggcctctcaaagtgctgggattacaggtgtgtgccaccacacccagcctggactttttgatagtaagtgattaggcagtgatacaatagcaaagacatggaaccagttcaaatgcccatcaatgatagactggataaagaaaatgtggtgcatatacaccatggaatactatgcatccataaaaaggagtgagatcatgtcctttgcagggacatggataaagctggaagccatcatcctcagcagactaacacaggaacagaaaaccgaacactgcatgttctcactcataagtgggagctgaacaaggagaacacatggacacagggaagggaacaacactcatcgaggccatgtggggtgggggtggtgaggggacgaagagcatcaggacacaaatagctaatgtatacggggcttaaaacctaaatgacgggttgataggtgcagcaaaccaccaaggaacatgtatacctgtgtaacaaacctgcacattctacacatgtgaactgtattacctgttgtcattatgctttatttatttatttatttatttattgagacagggtctctgtctcccaggctggaatgcagtggcaggatcatagctcactgtagtcctaaactcttggggtcaagagatctcctacctctgtcttccaagtagctgggactacaggtgcatgccaccatgcctggttaatttttttatttttattttttagagttgtggacttgctgtgtttctgaggtttgtcttgaactcttggcctcaaatgatcctcctgtgctggcctctcaaaatgttgggattacagaatgttgggattacagaagtgagccaccatgcttggctccactatgtttattttttaacaagccttttaaatgtattaatattttacatataatgtgtagattttaagtgtttagttcactatgtgttttttaaatcaatttttaattgtttagtgattagttgattacaggtagcaggcactaaaccaaatggaaggaggagtccaagagaggataacttttttcgcagagtgctagtgcttattaggggataaggtttatatattamctcattagaagatgggggcattattcacatttagaaagagaaactgagacttaggaaattaaagtgattgacccaaagtaacacagctaggaagtggcacagtcaagacaaaacagttttgttttgctctgtaaaatttttgctattactgactagtgacattgaaattattcagaaaaacaaaacttggtagagataatttcctgtgagggtttattgaagtcccataaaataaatgaaagcagcccatgataaggaggtcttctggtttcaaatgcttcaaagttcctcaagcttttttttttttttttttttttttgagatggagtctcactctgtcgcccagactggagtgcagtggtgtgatctcggctcactgcagcctctgcctcccaggcacaagcatttctcctgtctcaccctcctgagtagctgggactacaggcacgcaccatcatgcccagctaatttttgtagttttagtagagatagggtttcaccatgttggccaggctggtctcgaactcctgacctcaggtgatctacccacctcagcctcccaaagtgctggaattacaggcgtgagccaaagttcctyaggcttctaaaactgaggtagtgtaattttatcaggcattcctctataatgattgaggtaatcaggtaaaaggagttgttttcagtaacctaggtacgtttttrcttttcagtatgaaagaatataagactaataagaatgaaaattttgtttctaggtagtttatgctattgcatgtgtcttatatgcaagatttaaaggctgaaatgtaagtgatgttacttcattggataacagacaagccacatacttcagaggagatgatggataagtagttaatgaaatgttactgagtgaaaaaaaacctcttcaggtgtgtaggaatgtattatttaattcagtcagcatagaattcctgcaggcctcagatttttctttattctcttatgtttcatattcctttatcctttgcagcgtgtcagatacattgatgtgtttgaaaattgacaccaggtaaagaataaatatgataagtgaaagggtaaatgagagttcagacattctttattttcataaattattcttaaaatttttattttatggaaaatactagctcaaaaaatgggataattaggacagattttcaagagaaaacaatgattttttcaacagatatttttaaagcatctagataggtcaggtacttttttttggttaacattctgaaggcttctgatggagagtctatttgacattcttaaggttactgaaagcagaaaatggttttctcttaatatattattggtgggttttgtctcctagatttttttcctagttcttataaactggtaaaaacctagagtttttatttgtaataaaattttacttgtaataaaaaatttaaacatcttaaaataaattcagtgactgtttcatgttayagtctatcctatattcctggtatccctttttctgttctacttcttattttttaaataaaaaagtttgtgtgtatatattcttttcccctcgtttattcattctagattttgctttctgtcwtccttcctctgctcaaatacaagccctgtgagggcagggatatttctttgttgataaagcacagaaaatagtggaacatagtagatgttcaacaaattctttgttgaataaataatacttttaatattttaaagttaattctaatatatacacaaaagcatatataacatgtatactttttttttaaattaattttttttgagatggagtctctctctgtcacccaagctggagtgcaatggtgcaatctcggctcactgcaacctccgcctcccaggttcaagcgattctcctgcctcagcctcctgagtagacaggcatgtgccaccaygctcggctaattgttttttctgatagagatgggatttcacgatgttggccaggctggtctcgaactcctgacctcaggttatccgcccaccttggtctcccaaaatgctgggattacaggcgtgaggcactgtgcctggcccaacatatgtgtactttaaagaagaattacaaataaatgtctttgttctcactggtcaacttaaaaaatagtgtactgtcaataccttgaaattccctcatattcctcttttctatggcatttgcctccttccctctcctattggaagaataaattatttttattcatttgcatttttttcataattttacaacatgaatataactatattatttaagtgactggatatgactataactgtaaattgattttttagtttcagatttgttaaattttatattcatgaaatgatactgtatgtattctttagtttgctttattcattcaacattaggagtttgagattcatttgtgttgatgcatattgatatactccatttaaactgttacatggtattcagttacatgactatgtcactgtttattctatctgtgggcagttggtttgtgtctaaataacaagcagtgcaactacaaacatttagaaagtgtactctggtgtacatgtgcttcaagagttttttttttttttttttttttttgaggagagtctcgctctgtcacccaggctggagtgcaatggcgcgatctgggctcactgcaagctccgcctcccgagttcatgtcattctcctgcctcagcctcccgagtagctgggactacaggtgcccaccaccacgcccggctaattttttgtatttttagtagagacggggtttcatcgtgttagccaggatggtctcaatctcctgacctcgtgatccgcccacctcggcctcctgaagtgctgggattacaggcatgaaccaccgcgcccggctgcttcaagagtttctttaggccaggtgcagaagctcaggcctgtaatcccagctctttgggaagctgaggtggacagatcacctgaggtcaggagttcgagaccagcctggccatcatggcaaaacccggtctctactaaacatataaaaattagctgggcatggtgtgcatgcctgtaatcccagctacttgggaggctgaggaaggagaattgcttgaacctgggagatggaggttgcagtgagctgagatcatgccactgtgctccagcctgggcaacagagcaagactccctctcaaaaaaaaaaaaaaaaaaaaaaagccgggtgtggtgacacgcacctgtagcgccagctacttagaggccaaggtgagaggatcgtttgagccaaggagttcaaggctggtgtgagctgtgatcatgccactgtgctacagcctgggcaacagagcaagaccctatctctgggggaataaaaaaaaaggtccttcaggttatatagctaaagaaattctaggtcatataaaatgggcatttgtcaactaaatatggacagttgttttctgaaatggttgtaccagtttatgctcccatcaggtacttcagtgagaattccagtttctttccttgccagcacttggtattttaaaaatttagccattatactagatgtataatttttttttaaggaaaaaactttatttcattcttcaataactgtaattactagtggwgtgtatgttgggtattgtacaacttctcaaaccttagaatcattatacaccatcagctcttttcctgtaccatacaattttcacatagcatttattttttatgccagcgactactaacaaccagcttcaccaagatgtgacattattgaaaggaatgttgagtgaccttatgttaaagttgaattagctagaacttgtagtttgcatagtatccgacagatgtcaccgtatttaccttgaaaatttaaaatattttgcagcatccttgtgaatttgatgtgataccccaaggcacctgagcacacagtttgggaaccattgccttggaatattaatcatagttacctccagagagtgaaattttggataattaaaaaaatttcttttttcttgagatggagttttggtcttgttgcccaggctagagtgcaatggcgtgatctcggctcaccgcagactccgcctcccgctttcaagctattctcccgcctcatcctcccaagtagctgggattacaggcatgcaccaccacgcccggctaattttgtatttttagtagagacggggtttctccatgttggtcaggctggtctcgaattcccgacctcaggtgatcagcccgccttggcctcccaaagtgctgggattacaggtgtgagccactgtgcccagccaaaaaaaaaaaaaaaaatctttatactttctggattttccacttttataatgatcatataacacaagaggtgttatgattatatattttatgcattatgattatatatattgcatttactttttaaaatttttaactgaaattcataattttttctactttctttagtctttacctaatatcctttttctgttgcacccaggataccacattacagttagtcatcgcatttcctcagggtcctcttgccagttacagtttctcagacctctcttatatttgatgactttgaaaattttgaggggcattggtcaaatattttgtagaatgtctcaactgggatttgtgtgatgtttttctcatgattagattggatttttagggaggaaaatcacaggtaaaatgcatttctcatcacattgtatcaagggtacatgctgttctgcatgacttatttctgttgactgtaaacttgattacctggctaagatagggcttgtcaaatttcttcattgttaagttactactttattcacgcttttcatactgtactctttggaaggaagtcattgcacagtgcacacttaaagagtgaaggttgtgttccacttccttgaagataaaatacctacataaataagtttttcttcatttaagatttgtctgtgtattcagtcatatatttatgtaattggactcatggatatttgtttcatgctttggtttataatccagtactactttattttcttgctcagattgttctagctttggtcattgggagctcttttcagttggctgataagtccctttgacataccattgtcatgatggctttgtttgattttgtttgttttttaagtatttccttccctttctggcactacaagatgctccaggttcatcttgtatatttcctcagtcatagaatcagatatttctccaaggatccctgattccttttattggagaatggtattagaagccaagagctaggtgttaggtgtgtttgttgctactggggcacaatgtggttttaatttgcattcctgtgatgattgatgacatcagacaccattgtatatgtttattggttatttatatatcctgtttgtcatgtgacaagcctgtttaagacttttcctaacagcagtgttgcggttatgacagagactatatggctcacaaagcttaaaatatttattatctggccggttacaagaagagtttacttgcccctatagttataataactatgttaatgtcagtcctgttctgggttggttttgattggttgatttttcttatattttcttctttccgtgtctggttatctttgagtagatagtagacattgtaaagatacttgagttttttttcttttttataaatttcttgagacttttcttggcacgcagttaaattatttggaaatatttctgttctttaaggtcatacttttaagctttgttaggtggatcagatcaccgtttagggctgtcatcactagggcatataactgtactaatgtgacatgacccttctgaatgccataccagggaattataaggtttttcaagtctggctggtgggaacaggcactattatcgcttgtgtgtgagttccaggcttccaggcactgttccctctaatcctctcagatgattctttcctctctggtagttttcttctacacatgggcttatcagtacttggcggaatacttgagagaaactctccctagatctctaatattttctctctgtgcagctttctcctctacagcattctgtcctgtgcactctagatgccttagcgtctctagacactcagctccatctttttaactcagggcctctgcctgagttcctcttccctgcgctacatcctagaaatgctctcaaggcagtcagctggggtagttgtaggccctcccttcttttgtcctcagagatcactgtccttgctgcctaatgtccaatgtcttgaaaaccactatttagtccagggatgtacaatctttggcttccctgggccacactggaagaagaacagttgtcttgggccacatataaaatacactaacactaatgatagctgatggactaaaaaaaaaaaaaaattttcacaaaaaaagtctcataatgttttaaggaagtttgcgaatttgtgttgggccacattcaaagccatcctgggttgcgtgtggttcatgggccatgggttggacaagcttgatttactctatttcatctgctttcttcctttttttccagataggagggtaaatctagtccccgttactataccttggatagaagtagaagtctttgaggtctttttaaaaaattctgaatggatgtttaattttatcaaatgctttttctgtatctattgagaagatcatatgattttttttctttctctttttttccttctaatgtgttgaattaatttgattgattttttttttaaatgttaaaccaaccttaaatttctggaayaaacccaacttagtcacgatccttttttaacatattgctgaattcaatttactcatatgtgttttaagatttttacatctatattttgtacatacactgcccttcttcaggtttggacatcaagattttccttataaatggttatccaaggttatagtgggtgggaaatgttctctctttttctctagaaaagtttgcataatactggtgttcttttttaaagagaagcggtttaattggttcacggttccacaggctgttcaggaagcatggcagcatctgcttctggggaggcctcagggcgcttttactcatggtggaggcaaagcgggagcaggcctcttaaatggcaggagcagaaccatattagtccattctcatactgctatatagaaataactgagactgggtaaatttgtaaagaaataggcttaattggctcacagttctacaggcagaacaggaagcacagcagcttctgcttctgtggaggcctcatggtggaaggtgaaggagaagcaggcaggtcttacatggctggagcaggagcaagagagtggggaggcaaccagatctcacgagaactcactattgccaattgaaatcatgaggaactacccccatgatccaattccctcccaccagactccacctccaacattggggattgctgttcaacatgagatttggtcagggatacagatgcaaaccatatcagtcgtccaggctggtcttgaactcctggcctcaagtgatcctcccacctcagtctcttgaatagctgggattataggtgtgtgccaccatccccagctaatttttaaaattgtgttttagaaacatagtctcacatttggaccactgtttaattacagatctacttctctaacagatataggattgtttaggttttccatttgcacttgtttcggttttggtcagctgtgtttttctatgaagacaaatgatctgttcaaggtcatacatcttataatgaataaactttccaatcttaaactttttcaaatggtgtcataccaacataatacgtatgtttaaatttgtaaactcttttatcctctctactagaatatcaactagtgggtagattctgtatttactaaaacttcctatcatctgagtcttaaggcctataaayagatatttgaattaaattaaagcatgcttggggccagacatggtggctcatgcctgtaatcccagcactttgggaggccgaggcgggtgggtcacttgaggtcaggagtttgagaccagcctggccatcatggcgaaaccccatctctactaaaaaatacaaaaattagctgggcgtggtggtgcgtgcctgtaatcccacctacttgggaggctgaggcaagagaattgcttgaacctggaaggtggcggttgcagtgagccgagatcacatcactgccctccagcctgggagacagagtgagactgtgcctcaaaaataaatacatagatagatagatagatagatagatagatagatagatagataaatggaaaccttgatttaagtagttgcttcagtagttcatttgggctttgtcagtcaataacacattttacttctgtagtaatgggttactgataagggaaagatatgttagggtatgtattgaataaaaaggtgggaatggtgaattgaaagtatagttctttaaattatttactcatttttttaaaattgtttggtgttttattaaatacatggcactttaataacaaatgtaagctcctctttctctgttaccagagacctgtcttttattattattattattattattttttaaaattgataattcttgggtgtttctcgcagagggggatttggcagggtcataggacaatagtggagggaaggtcagcagataaacaagtgaacaaaggtctctggttttcctaggcagaggaccctgcggccttccgcagtgtttgtgtccctgggtacttgagattagggagtggtgatgactcttaacgagcatgctgccttcaagcatctgtttaagaaagcacatcttgcactgcccttaatccatttaaccctgagtggacacagcacatgtttcagagagcagcgggttgggggtaaggtgatagatcaacagcatcccagggcagaagaatttttcttagtacagaacaaaatggagtctcctatgtctacttctttctacacagacacagcaacaacctgatttctctatcttttccccacatttcccccttttccatttgacaaaaccgccatcgtcatcatggcccgttctcagtgagctgttgggtacacctcccagacggggtggtggccgggcagaggggctggctcctcacttcccagaaggggcggccgggcagaggcgccccccacctcccggacggggcggctgccgggcggagacgctcctcacttcctggacggggcggctgccgggcggaggggttcctcacttctctgacggggcggctgccgggcggaggggctcctcacttctcagacggggcggctgccgggcggaggggctcctcacttctcagacggggcggctgggcagagacgctcctcacctcccagacggggtcgcagccgggcagagacgctcctcacatcccagacggggcggcggggcagaggcgctccccacatctcagacgatgggcggccaggcagagacgctcctcacttcctagatgggatggtggctgggaagaggcactcctcacttcctagacgggatggcggccgggaagaggcgctcctcacttcccagactgggcagctgggcagaggggctcctcacatcccagatgatgggcggccaggcagagacgctcctcacttcccagacggggtggcggctgggcagaggctgcaatctcggcactttgggaggccaaggcaggcggctgggaggtggaggttgtagcgagctgagatcacgccactgcactccagcctgggcaacattgagcactgagtgaatgagactccgtctgcaatcccggcacctcgggaggcccaggctggcagatcactcgcggttaggagctggagaccagcccggccaacacagcgaaaccccgtctccaccaaaaaaatacgaaaaccagtcaggcatggcggcgcgcgcctgcaatcgcaggggttcggcaggctgagacaggagaatcaggcagggaggttgcagtgagtggagacggcagcagtacagtccagcttccgctcggcatcagagggagaccgtggaaagagagggagagggagactgtggggagagggagatggagaggggagaggggagagggagcttatttactcattttaaaatttatttttagagatggggtcttgctctgttgccgaggctggagtgcagtggcacaatcataactcactgcagccaggctcactccccagctcaggctgtcctcctgcctcagcttcctgagtagctaggactgcaggcacatgccatgacacctgggtaatatttaaaattttcttagagacagagtctcactatgttgcccaggctgctcttgaattcctgggctcaagttatcctcccacctcagcctcctgaatagctaggattacaagcatgagctatcttgcctggctctggttcttaaaccttggaggttccatttatatggttgtatttctttttcttttctttttctttttttttttttttgagacagtgtctccctctgtcgccaggctggagtgcagcggggcgatctcggctcactgcaacctccgcctcctgggttcaagcgattctcctgcctcagcctcccaagtagctgggactacaggcccacaccaccacccttggctaatttttgtatttctagtagagacggggtttcactatgttggccaggatggtctcgatctcctgaccttgtgatcctctcccctcggcctcccaaagtgctgggattacaggcgtgagtcactgtgcccagcctgttgtatttatttttctagattacagttaattttgttttcatttcttgaaacctagtagaatatgtatctgcctataattcaagggcaattgaaagaaagaaaaataactcaaggccaggcatggtggctcacatctgttatcccagaactttgggaggctgaggcaggaggatcatttgagcccaggagttcaagaccagcgtgggcaacataatgagactctgatgctacaaaaaacttaaaaaaaaaaaaaaaaaattaaccaggcatggtggcacatgtctagctacttgggaggctgaggtgggagtattgcttgagcccaggaggtcaaggctgcagtgagtggtgattgtactctgcacagtgaaaccctgtctcaaaaaaaaaaaaaaaaaaaaggaaaagaaaaataatgcaagttcagcatatgatttagcaaaaccatttttgatttctctttgagagagattgtaacttgaatcctccttttagtggggagaatttaatgaatattttacatttcagtgtaataaaatgtgtccaacttgttacacaagacttagtttaagattcacatgtttgggaagaatgtgggtttgagtggtgagggttcagttgaaggtctctttctataaagtatataatttgttgccaaaggaaatattacctagcagcagtttacatgtgccaagagaggacagagaagtcttatagtagaaattgtacagaggagctgtcaaactagatccctgaggatgtcagacaggaaataaagcttatgatgctaaaaaattttactggatgactaggccattggaaatgaatcttccaatgcttgtgttttttttttatcatgcttttatttgaaaacagttacttacacttacaaatttaaactgtttaaggtatttagaccaaaatttaagaaactttataagatcttattggctaaatattgacttaactatatatatatatatatatatatatatatatatwtwtttttttttttttttttttttttgagatggagtctcactctgtcacgcaggttggagtgcagtggtgtgatcttggctcactgcaacctccgcttgctgggttcaggtgattctcctgtctcagcctcctgagtagctgggactacaggcccgcaccaccacacccagctaatttttgtatttttagtagaaacggggtttcaccacattggccaggctggtgtccatctcttgacctcatgatctgcctgcctcggcctcccagagtgctgggattacaggcgtgagccaccgcgcccggccaactatatctttttcttagaaagtgtttatcctctgagattaaggtttggaaagttataaggagagagactttaggttcttggagataaaatatagtaatgtaagcaatttccttctctatgccaaacgtggaaatacagacaatatgtataagcaattgtgccaaagtatttatctgtggttctctttattcctaaaatatattgcccatttctactatacacattcagatacactgtacagaattatagagatttggaacctgaaggactttaaagaacattcaaatttctttattttgtggagaagggacatgagacaggtaacattaaactgataagaacagatactacacttgatcttggccaaaaggccaagaagcgataggtaacataaaaatacagatagtttgcccagtatcatgaagggaataggagcagacttagctcttggagaaatagaatctttccttatttactgttgcagtaatgagttatttgaatttttatttatttattttagagacagggtctcactctgtcacccaggctggaatgcagtggtagcaatcttcctgcctcagcctcctgagtagctgggactacaggggcatgtcaccatgcccagctaattcttaaagttttttttgtagagatggggtttcactatgttggccaggctggagttgaagttttagaggtacatgatggctttggttttcttaccaccagatgatttatgaaagttgatgtatcagttgactgtcagcagaagtgaaaaactgtcaagcccctttgaagactattattattcaggaaacaaaacagtgttgacactaaatttttttttttttttttttgagacagggtcttgctctgttacccaggctggagggcagtggcattatctcagctcactggaacctccaccttgcaggtttaagctattctcctgcctcagcctcctgagcaggtgggattacaggtgcccactgccatgcctggctaatttttgtatttttagtagtacattaccagtgtagtttgtttgtttgttttttgacaaacaaagggttttgagaaagatggagtttcaccatcttggccaggctggtcttgaactcctaatcttgtgatccacctgcctcaccctcccaaagtgctgggattacaggcctgagccactgcactggcctttttttttttttttttttaaagtaaaacacaggatcagaaatctctttgttttgcatcatttgtgcaatatttgttttgtttgttttttccttaatgtcttgagagccagcaaagattatctgacagacagaattagactgaaatctcttagggaggttgtgaagtatttagagttaaaggctagagttaagaataagcagtggcaaaggtataactataaacctcaaagtgttactgacttaggattcattcatgactcttctgcattaagattgggagttaacttttaaaaactaggtacctccgtgaaacatgtatgcatcttactggacactcctttgtcgtttttccaatcacttctgccagatgggttttaatataataggaagaattgttacgatgtcagctctgttgtaatttggactggaatgattctgttctcttgtgaacttgaagagtccagttgaatcactttctagttattgtctttatttttttattgtagtttttaagtgtttgtttctacttgtggtaataatcctgttaggatgcatattaccaactatatgtgaaggcctggctatatggagcataaaattagatatgcttctttcctttggctcacagtctaaatttagtaggtgagagtttcctttcctagatgtcattaaaaatagaagatacccatctgtctggaatgggttagatacacttctccctacaggctgagagatgaattatataacactaacttccttttagccctaggattcttagaaaaaaatgtttctcttttaatacagaggccaagagtgtatagtttgaatgttaaccttaaattatcctataagtttgtgaaactcaggaagtcctaagaaaattgaattttgaggagaaatcgaaaagataaggtgaaacaacatcacttgattaagaaattggctttgaggtaaaatctgttcccagccctagatttacaatttactagctgtgtaagaaagttgtttaacctgagactgtaacttcattattgtggttggaatagtaaggaccgcttgttgaggggcaaattaaatgagtgaatatttataaagtgctttcttcagtgcttgggatgtaaaagacatttctggtggtggttattactgttaatgttaatattacttctggttctttttattaaaaatctgccatctcactattaaaaatcttaatttggagctcaggatagaatatgaggtcagagttaaatagggaattcctaggtgtatttggagtcctggaagtcatttagaggaggactgaaaaatcatcctcaaaggactacctgtgttagtggatgcagaagaaacaggaaaacagactgcgagaaagccatcaatgaggtgaaaagagaaccaggggaatgatgtcatgggattcaagagagagattgctcactgggtcagaaagtttcttcaggagttcatttaaaaatattttcagcactaggtgatgtcaggtagggaaggcctctgaggaaaccattgaactgggcaggtaagaggtcctcatctttgagagagtggaaaaatgactgtagacctagacttgattaggcagagaaggaaacaagcagtgaggaaaagcagagggcaggtgtctaagatggaacctcatgaaaatttagctgtatagagaaagagagagatgacttaagggagaggagaaggtgtttgggtagggctgggcgcggtgcctcacgcctgtaatcccagcactttgggaggccggggtgggtggatcacctgaggtcaagcattcaagaccagcctggccaacatggcgaaaccccgcctctactgaaaatacaaagattagctgggcatggttgcggggtcctgtaatcccagctacttgggaagctgaggcaggagaattgcgtgaacctgggaggtggaggttgcagtgagcttagatcgtgccactgcactccagcctgggcgacagagtgacactccatctcaaaaaaaaaaaagtgggtttgtttgtttcattttggtaagagaaaaaattggcatgtttgaaggctgagggagaggttaaacttactgggcagggagtagctgatggtgaagttgtggtcagaggcaagtgggactggaatccagtgcacaggtggtggctggaggagcagctgatctttatgaaagaggaggactgagggagggtaagtaagatagaggctgcaggggaaaatgaggaaattcatgtctaatggcctcttaccgatttaagtagggaaacggtaatgaactcatcattgggataattaggatagatgaatagatccttttctgctgctaaataaataaaagtagacttgggaaaaaggaatatcattattttcctatggaagcatatattaaaacattagaccaatggttctcaactgagagtgattttgtcccttgggacatttagcaatgtctggagacatgtttgtcaccgacgtggggtgtgttactggtgtctagtgtgtggaggccagggatgccgctagacatcctgcagtgcacaggacagcacccacatcaaggaatgatgtgatcccaagtgtccatagtgttggagttgagaactttgccctagaccagtatgtgcctacaacatacacttcaacaaaagctaagaagttcacataacagcttgatgtctctatccccttgtggaaagtcacagtatatgtttagtttattcaagtctgaaaaattctcaaaaggaaatctaaactgtttagctgactgacattttccctgctctttcatagcaactgttaacaaacacactgagaaatacatttagggggaaaggatgtacttcagtctcttggctggtcagtactatgtattcatccctgtatttctagtgtctgacacagttcttggcatattttgtggtactaaattgactccagcctataccattcccctgaactctagactcaaaattccagctgcctgttctgcatttttgctcagatgtccagtagcttctcaaccctaacacttccaaagtggagctcctaatagacctcccagacatgtctggaggtctcatcttagtcagtggctattccatccttccagttgctcagatcaaaggccttggagtcattcttcaccttgtcttatcctctgcattcccatccattggtaagtctcagctctatctctaggaaatattcagcatttaactattttccactctctctactgatttaaactgtggcctgagttgttagagcagtcttacaactggcttccctgcttccgttcttgtctcccaatacagtagccagtgagatccttttaaaatgtcagtcaaatcacatcactccttgttcaaaacgctccattggctcctcatttgcttcagtatacaagctgaaggcttttcagtggcctacatggctgtgcgtgaactggttcttcagtatgtctctgacctcttcccctcctcatcaatctgtgcctggttccacttcagtctcagttgggtttgttgttgttgttgttgttaagagatggggtctcactgtgttgcccaggctggattcaaactcctggactcaagcagtcctcccttttcagcctcctgaatagctgggattgtaggcatgcatcaccgtgcccagctcagtcacagtttttagttcagtgttttgctgttgctcaaacacatcaggcaagctaactcggggcctgtgcacttgctcttttctctgcctagaataattttctaccacatttccctcacggtttattctttcacctccttcaagttatttttgcttagatgtcatcttagtgaggtcttttgtgatcagcctgtttccaattgcagctctttgtcccctttgtctgcttgctttttctccagagcacttatcaccatctaatatactatgtaatttatataatttgtactgtctccccctactagaggtaacttattttagtccaagaacattttatgtgtgttttgctcattactgtgttacctgcaatttgaacattgcgtgacatgtaataggcctttaatgaatgattgttgaaagaatgaatagtgattaaagcaaaggctctgacttagaaccgaaattgagtcctggtgctggcactcgtctgctttgtgatcttaggcatgtcattaacctatctggcctgcttactcttctctgaaatggagatagtagaaccaagtaggtttgtcttgaggattcaatgcaagaatctgtgtaaagctctcagctcagaatctggtgcataataaacagtcaataagtgattgcttttattactactttttcttcccttccaatgtgaaaacctgggccacttctgacatatatgttgcaagttgcaattctaagctaaatgttggcaatcaccacaagagacaagagctacttctcatagatctgtagaatacactgatatttgtgctttaaaatcttacattaaagtatggcagttccttaaaaaattaaacatagagttattatatgatccagccactcaacttctgggcgtgtgcccagataaattgaaagcaggtacttgaacagattggtacaccaaggttagtagcagcattattcacaatggccaaaaggtgcacacaacccggatgtccattgatatagatggacagataaacaaaatgtgttatatccatacaatgggatattatttagctataaaaagcaatgaaattctgacacatgctacaacatggatgaacgttgaagacactatgctgaatgaaataagccagacacaaaacgacaaatatgattccacttatacaaagtacttagagtagtcaaattcatagagacagtagaatttaacacctgttactgacagacacatgatttcctcatattcattactcactcaaagtctggaatgttcaaggccagccagagcctaagccaaagtaccagtgataattcttatgttttgcttaaacataaggtktgtatttgtttttctttgaaggatgaaaagctgccgtctgtaatcctagcactttgggaggctgaggcgggtgcatcacttgaggccaggaggtcgagactagcgtggccaacatggcaaaaccctgtctctactaaaaatacaaaaaaattagccaggcatggtagcgcacatctcatctactaggcgggctgagtcacaagaatcacttgaacccagaggcggaggttgcagtgaactgagatcgcactgctgcattccagcctgggcaatagagtgatgagatactgtctcaaaaaaaaaaaaaagataaaaagtgatttctttcataacaaaattctataggaattacatcatgcttagtttaatttggggaagtatctgcatatatattttctctattttttcctggatatgaatatgtattcttaaaattcctaaaggatgccaagaatgtagctaacagtatcagaaataaacttcaaggaagtgtttctctacatctcaacaaaatcacttctctatatctcaacaaaatccctacaagtaaatctgtttttaaaatttgtctcaaaacatttgcggtaaagacaattttggacacacatctaattttttttttttaatctgtgattttgccaattgagaagaactggaaacaggagggagaattttgatgtcgtagatgttcttgttgattaagggataagggcacatacagacaaacccaggaattatctgacttcggctaaaacaacaacaacaaaacatctccagtactagcctgagtaattgcttttggcataatagctgttacctcagacagactgaaagtttaataactagattggagacttccctttgcagttcacaaataggaaaaacaccaccacagaagttctgtcacacatctgacccccttcgattcttaatttacagtgtgactgcatcttgcagccatgccccatcttagcattcttaaattataatgttacaggttattggcctgccaaaatgttcgatatgtaacattgaacagttccaaatgagatgaaaacaatcttgttactcatgagagtttgttttttctaggcttctgtttcattttatgcaccagtatagtcattttgtggaaaataaaggttacactgctttattaagtctcttttataattgtaatccagatttaccatccaataagagataacattgttatattttctgtcatgttctaaatatgtgctgggcatgatggctcacacctgtaatcccagcactttgggaagccgaggcaggaggattgcttgaggccaggagtttgagactggcctggacaacatagcaagacccagtctctccaaaaaataaaaaaaaattatccaggtgttgtggtgtgcatctgtagtcccagctactgaggagattgaagtgggaggatctcttgagtccaggagattgaggttgcagtgagctatgattgtgccactgtaccctagcctgggcaacagagtgagaccctgtctcatatatatatatgtgtatatacacatatatatatgtgtgtgtatagatatatatatacacacacacacacatatatatattcttatatagatcagaatttatatacatataagaatattcttagaggaatattcatattcttgtatacattcttatatatgtaagaatatatacatataagaatatacattcttaaataatgttggtgttgaaatattgaagtttccattgctattattttaattcttgaaggttcacgaaatatctgtaatctttcttccttgaaatatatatttcaagcaacatatccttctgaaatatccagaatgcattttgccagtaacaaaagaatattcttttgaaataccagacttgtaatgggagttagagaaatcttcctacttctttctcttcttcctgcctttttaaatcacaaaactgtaagactatcctggtatttgatataaattttatttgtatataaaatatttaaatattttaagtattaatatattgaagattacatatatctgtgtctatatctatttcaggcctttaaactctttggggagttcaaagaactagaaaaaagaatgatttaatttatttacttttttttctaaattattactttttccccgagacggagtctcactctgtctcccaggttggagtgaagtggcatgatcttggctcactgcaatctctacctcccgagttcaagcaattctcctgtctcagcctcctgagtagctgggattacaggcacacaccaccatgctgggctaatttttgtatttttattagagacagggtttcaccatgttggccaggctggtgtcaaacttctgacctcaagtgatctgcccacctcggtctcccaaagtgctgggattacaggcgtgagccaccgcgcccrgctaattttttaacttttaacaaattttgcattgtttctttttggtattcctagaagtaattgtatacgtaatataatctttcttttctcattgatgagtagaatgataggagtgaatcaaagaagtttcctaccattttaaaattctttccctacttctcaaaaaaaatgtgtttgatatttatttaaacgttaagttataggcaaccatgtatcctggaaaatagtcaggagtatatatattttactgtcatagratgtggtccatgcaatactttaagtgaataaggccagttgcatagtttatatcatataatttcattttcgtttaagagaaccacatgtttgattatgcaaagacaaaggtttggaaaggtgtacagttattgagtgtgataaaccctgggagaatgggatagaggcagggtactgcctcaggttgggttccccagaagcaggagttgagataaacttttatgggaagacaacttactgagaagagtttcagaaaaacctgctagggagtgggaaagtaggactggggacaggaagaggaggctggtatcaaggatgtgataccaagaaagcctcaaggtagacaactttggctagtcttgcaagggagttctggagcttatacctaagagttgtcactgccagggaccaaagaaataaagtagagcctttatactttcatacccatcagtaattgctaaggaccatccctggtggggaggtgatatggtttgcctgtgtccccacccaaatctcatcttgaattcctttgtgttgtgggagggacccggtgggaggtaattgaatcatgggggcaggtttttcctgtgttctccttgtgatagtgaataagtctcacgagatctgatggttctgcaagggggagttcccctgcacaagctctctctttgcctgctgccatccatgtaagacatgacttgctcctccttgccttctgccatgattatgaggcacccccattaaaccctttttcctgtataagttacccagtcttgggtatgtctttatcaacagtgtgaaaaacagactaatacaggatgagtgtataaatgtccaggaagtgctggcagactgagggtagcccctctacaaagacctgcaggtgctggctgttgggagtgagagcacagggttgggaggaaatgtgggcagagcactgacagcagttgtagccctcacccaagttacagagattttaaaaagattggggtttaattctttctcagtttaagcctcccagggcctttatggtggctccacagagatccaggctccttctattcttttgttttgttttgtttttccaggcttcttctctcttgttgctctctcatcactagcttattgcccacatccacgtggtccaagatgctcaatattatgtccatattcccattagaaaaaagggggaaagtcaggaggaagagagcacattaattcctctaaggacaagttctcaaagttacatcacttcacctcaaatcccactggccatcatttagttccatggccatacctggatgcaaggaagactagtgtttattatggttggccttatgcccagttaaaaataggagactctgttattatgtaatcatttctgtagaaggagagaacacgtattgtaggactatctattatagggatgttcattttctgttttatagggatatgctttgttttttagtttaataagcatgtattttttgtcttaactatcacaggttaggggctccagaaagcagaatttgagacacaacttaatgtgcagaatgttaagtagtgctcttctgttcaactcctgtggaagggaagaagcaagatttggcagggagaagttgagctgtggtacactgtgaacaacaggagctgactccacagggagctctggagctaacgtggacttttagagttgccctgctttgagcagaaatggctggaccatttatacctttgtctccgttggttactggatgagggattgtcttgggaagcacatgaccttgggcaaggtagctctgcagaggtaatgtctacaggagctgacagtactcccagcaagttctttcttgaagggagagctgggtgacacatctgtttgtctgtcacaacttcgtgtgtgaaagtaattaatacattttatgtatctattttataacttaaaaatttataatttaaagtttcttttattcctttatcagtagtttcttgtgtaactattagtactgggctttattatagacattggagatagggaaatgtccctcccctcatgaagtttgcattatatttggagatagataataaataaattttggctgggcgtggcggcttacacctgtaatcttagtacttagggaggctgagacaggcggatcaactgacctcagaagttcgagaccagcctgggcaacatggggagaccctgtctctatagaaaacacaaaaagtagctgggcgtggtggtgtgagcctgtagtcccagctacttggggagctgaggcggaagggtcacttgagcccaggaggtcgaggcttcagtgagccgtgttggagcccctgcacatcagcctgggtggcagagccagagtttgtctcaaagataaataagtataaggaagggtgttgctgttttatatggggtggtcagggaagaccagaaatgcaataagatgatttgagtgaaatgatggaactagctctgcagatattttgggaagagcggtccaagctgagattacagtgaattccaagacaaccctgtggcaggaatgtgtagagtattggtgtgtacatgaaacagcaaggagagcagtgtggctagaatgaatgagaatagtaggatgaagaataataggagataaagtcttggatataatagtggtgatcagatcatatgagaccttgtaagccattgtaaagacttggggatcttctcagaatgagatgggaaaccatgtgaagattctgagctaagtgatagaatttgacatattttaaaagatcatcttgtctgctgtgtttggaatgaactgtacccgaacaactggaaaaatggagttgctccaaccgagaaggggaagactgtgaatagagtaggtttttggggtgaatagttgcaattaagttttgtatctgataagtttggagtaccaatgagacattcagatagagatgacaaatagaaagttagaaagtggagactggaattcaggggagaagtccagtgtgtagattaaaaaaacgtaggtgtcggccgggcacggtggctcacgcctgtaatcccagcactttgggaggccgaggagggcagatcatgaggtcaggagatcaagaccatcctggccaacatggtgaaaccctgtctctagtaaaaatacaaaaattagccaggcgtgtcagtgtgtgcctgtagtcccagctactcgggaggctgaggcaggagaattgcttgaacccgggaggcgaaggctgcagtgagccaagatcacactgctgcactccaacctgggtgacagagcgagaccctgtctcaaaaaaaaaaaaaaaaggaggtgtcatcagtgtccagttggtgtgtaaagccatgaaaattcacactgtcacctatggaatgagtggagaagagaacatctcagagatttgagctcaggaacactccaacatttccacgttggatcatgaggtgaaccatcagtggaaactttgagaaggagcagcctgtgaagtaagaggaggaaatgatttttttatttttgagatggagttttgttctgttgcccaggctggagtgcagtggcatgatcttggctcactgcagccttcccctcctgggttcaagcaattctcctgcctcagcctcccgagtagctgggattacaggcgtgcaccaccatgcccagctaatttttgtatttttagtagagacagtgtttcaccatgttagccaggctggtcttgaactcctgacctcaagtgatccacccaccttggcctcccaaagtgttgggattataggcatgagccatcgtgcccagccggaaatgatgttttagaaggcaaccaggagtgtttcaagaagaggaaaatgatcaacagtgtccagtgctgtcgataagtaacataagatgaagactgataattaccctttggatttaccagtatggaactcattggtagtgacaagcagtgattcagtggaatgatgggaacaaagtgaattggtgtgtgttcgacagagaatgggggatgaatgggagacagctctatagacaagtcttctaaagagttaatgctgtgaaggagagtagagaaacagcatgaaggctagaggagcatgtgagctagaaagaagagttttaaattggaagctaatgcaccctgtttgaatgctgatgatagttatccagcacagaggcccattggtgatgctgcaagaagagaacagttgatgggctgatgtccttgaataacagtgagggatgtgaaggttaaggcatgaatggagggcttggccttagatagtaacatagttcaatcaagataatagaaggaagacagaataatatgtgtggctacratagcaagtagatggtacattgtggctgggcatgtgtggaggatctttactgattttstctggtggttttttgttgttgttgttgtttgacagagtcttgctctgttgcccaggctagagtgtagtggcgtgatcttggctcactgtagcctccgactcctggattcaagctattctcctgtctcagcctcccaagtaactggcaccatgcctggctaatatttatttatttatttattttttagtagagacggtgtttcaccatgttggccaggtggtcttgaactcctgacctcaagtgatccacctccctcggcttcccaaagttctgggattacaggcatgagccaccatgtgcagccaagcctgatttttttttttttttttttttttttttttttttttttaagagacggagtcttgctctgtcgcccaggctggagtgcagtggcgtgatctcagctcactgcaagctccgcctcctgggttcacgccattctcctgcctcagcctcccaagtagctgggactacaggcgcccaccaccacgcctggctaatttttttatttttatttttatttttttatttttggtagagacggggtttcatcgtgttagccaggatggtctcgatctcctgacctcgtgatctgctcgcctcggcctcccgcagtgctgggattacaggcgtgagccactgtgcccggcccaagcctctgttttttagtgaaatataaaacaattgccatcagctgaaaagtggggatggcggatgagatgttggatgtttgaggagagaagagaaagtgtgagatagggctctggaaagtgaagagtgagtggactaggaatgtagtggaaatgcccattctgtggtcatgctttgaaagtgagatcagtcagcatgattatgtgtatttcttcagccctatttagtagcccaggtgcaagcatggagtaggtagaatgttggatttaactgagtgataaataaaactaaatattcactttgaaagctgtttttaggaggtcggtgatgtgaatggtatttagaattttagctttttaattatacccattttggaaggctaaacttagtgartgacaggtcattaaaaaagcaaaaaagaaacggcattgttccaggaaaggttcttggttgaaaattacagaccttaattccagccaacttaagcagaaaatgaatttattggaaagttgtcaagtacctcacagcatggatggaaagactggagaatctggttcagaaaataggcaagaaccaagggaatccaaatatctgtaatcatggctgaagtcatgcccctaggggagtctggttccggatgctgttgccaccatttttgaaccctggtattgcatctgttggagtgagttatgaacctgtcctttcttttttttgagacagagtctcgctttgtcacccaggctggagtgcagtggcgcgatctcagctcactgcaagctccgcctcccgggttcacctattctcctgcctcagcctccggagtagctggaactacaggcgcctgccaccatgcccagctatttttttgtatttttagtagagacggggtttcaccatgttggccaggatggtctcgatctcttgacctcatgatccacctgcctcggcctcccaaagtgctgggattacaggcatgagccaccgtgcccagctaacctatcctttctcatttgagccactggctgcatctcaaaaacctctaaaaagattactctgaggccaagcatggtggcacacccctgtaatcccagcagtttgggaggctgaggtgggaagatctcttgagtccaggaggtcgctgctatgtcaagaatggagtataggagtgtaagagtagatgtggggagaataagtcatgaggctccaaaatagatgatattgacttagattaggatagtgacagtggagatgaaaagaagtggatagattcatgaactagcccattaggctgttgttaaaattcttgtttagggaaaaattccttccttctcccctgccccttccttctccttcttcatcatcctccttcctcttcctcatctctccatcgctccttactctttcttcctcctccttcctcatcatcctccttcctcttcctcatctctccatggctccttactctttcttcctcctcctctctcctccacatcctccctcgttttcctctccttcctcttcttcttatctacctcctcctttcttgaaatctagacctttctagaggccttttacatactcctatcttgcataaggcagagtaacttatctagcagatattttataaaatcttgtagtattcatcatttgttaattaagaaaatatgcctagctcctagtatgtatactattgtgctgaagggggttgttgtagtcatttcagaattgagttcaagtctagacacacagaaatggtttatttcttctagggcactacatgcttgctgtctaggctaaccttttttctaggtgtgggtaattgagaatacatgatctaggtttcacctcaactttatttcccagcactcattagttccttattgtagtcatttacatatctgttattggaaatgggccaaatgtttatccattattttaaaaataataagaaaacaggtatctttttttttatcttcctaagacggtgaaggctagctactcagagactgccatgggaggatcacttgagcccaggagttcaaggttgcagtgagctgtgattgtgccactacattccagcctgggtgacagagtgagaccctgtctttctcttaaaacaaaacaaacaaacactgcccccsccaaccccaaaccaaaaaaaaacccagctagattactgcctcaaacttaatgtgcacacaagccatcttgaaagcttgttgaaatgcaaattctgattttgtaggtctgaagtggggcctaagattctgcctttctgttaagctctgtggtgatgctgatgctgctggtctatagatctcattttgagtaacaagaaactagataatatcctttgcactttcatctttgtatgggttattctgctttggggcatgttttggagctgtttaatttgaccacaggttaagtagtacattttaagaagattgaattgtataaccttttcctgcttttttgggccatattcttgaaggttataatactataaatagcttaagatttttagtttcagctttggaaatagatgaagagaagtctcagaagcagtataatttttattgaatcattaaatttgcagcagcacaattggtttatctacttgaggtagtctgaactacaagtagagtattagtaactgaattaagaataagaaaagatacaatgctgaaaatcattattagatatgtagaatacagttaagacttggggagtttctgttttgtagggttgggaatgttttggataaggtatatggtatatcagcactgggcttcttagctggggcgatctgcctcccaagacacatttggcaatatctggagatatttttagccgtcaaaacaagtaggggggtgatgcaactggcatctagtgcgtagaggcgagggatgccgcyaaacactctacagtgtaccagacaacccccacaacaaagacttatttggcccaaaatggcaggagtgagaaggttaagaaactctatgttagggagttttcaaaagcactttatttttaaaattaaaaataatacatccaggcatggtggttcatgcctgtaatcctagaactttgcgaggccaaggtatgaggattgcttgagcccatgagttcaagaccagcatgggcaaaatagcgagaccccatctctacaaaaaattaagatattaggtgggtgtgtgcattagtttgttttcacattgctataaagaactacctgagactggataatttataaagcaaagaggttaagttgactcatagtactatagcctgtacaggaatcatggctgagtaggcctcaggaaacaatcctggagaaaggcagaggggaagcaggaacatcttacatggctggagaaggaggaagagagaacagtggggaggtgctacacacttctaaacaaccaaatcttctgagaacttactatcaggagaatagcaagggggaaatctgcccccatgatccagtcacctcctatcaggcccctcctccaacattggggattacaattcgacatgagatttgggtggtgacacaaatccaaaccatatcagcatggtggtgtgcatctgtagttccagctacatggggtggtgaggtggaaggattggttgagcccaggagtttgaggctgtcatgaactgtgattgtgccactgcactccagcctgggtgacagtgagaccctgtctcaaaaaaaacaaaacaaaacaaaacagttgagaccattctattgacgtatcaacaaaaactttttaaatgaaamattttaaatttacagaaaattaaatagaataattaatccccacattctcatcacctaacttcaacaatcatgaattgatggccagttatatactttacgtatattatatctataaatttgatatatttgtgtatatccacactcacctaaccctgagtttttgaagcaaattctaggtatcacatcatttaatctgtaaatatttcagtatgcgtatttaaaacatgaggactctttttgagccattatcacacacataaaattaccagtttccctgattcattatctcttctctcttgttttcttccaaatggatttttttgcttttaatgagatttcacataatgaaagagcactaattttacaaagcaatggaaattgatgctacatgggccaaacaaaagctatctgccgcaagtacttttttctaattatttttctagaatgtctttatttgtttgaaagtgccgtgtaaaataatgcaatactttctcttttctactgtgtctgttttacaaatcgcctttttcatcttccccagtattttctgagttatcttcaggctttgttatatttgctatagcaatggcctctggggactagttactacttactagctagtacctgcaggaatcattttcttaactggtggtgagcttcttgagggcaaggaccaagtcttaccaactttctgcctgataaccattagcatgtcctcaatatttgttggatggctgctactaatcttgagggcatcatgccaatattgactgatgtatcaatcaatgctactggcrtgtggtatttacagcaaaaaactaagtgtgctcatttagctataacatgtctttagcagaagagataagtcagatgttaacatttgatacctgcatctatgggaggtgaagtagagaatgctgttttctctagttacattcctttgtttcttcttacacttatttatagggtgaccatatgtcctagtttgcctgatacagtctggktttccaaagtctaatagtgccccttttcattcacagaattgtcctagtctaggtggtaaattaaatggcagtattacttacataacatttaatgtatgccagactctcttctaaacactttacatacattctcacttaatcttcatgataaccctgggaaacagtttctattattctacccatcttacatatgggaaagttgaagcacaaagaggtcaagtgacttggctaaaatcatgcagctgtatttgaatagtaagtggyagcaccaggattgagtgcaggctgtttgacaccagtgctcttacccacgccactcttgcccctatgctggtcccaaatatatctgtctgcctctgtagactacattttgatctattaagaatctcctgataattaatctgcatatttttagatcagcagtctggctaaggctttggaatttgaagggtttcctttgttttcacaaaatccttatagattctacatgtaccactaggccaatccgattatagtcttctttctcagaagaytgaatggtgaccttttttcatctttgtaatgccagctattcagcattccctctgagaccctccagtgatgaggtttcccagcatttggagagtatcaagtccctgcctcagtcacttttccttatctctgaccacctgtggtagctgaagttctctttccagcacctggaacagtggcagccatagagcaggcacacataaactgtttcactgcctttgattagtgcatattttggagttgcctggaaacagtgttcaaggcacttacataaggtgctttaagtaagaggttattgtaagctactgctttcaagtagcttacaatttaggaaggggatgacgagtgtacacaaataactatgatatacggcaattgaactatataagcaaagtattttaagagttcagaaaaaaacaaattgtttctgacaggagtgatccagaaaagtttgatagagatggtggtactaagtcagtttaataacttttaaattggctaaaaaattactgtctacttatgtttgctaagggtagaggcttgacagaagaataagacttgatgaacctccaggagaagaggatgtgtcagcttgacacttggtcctcttgggaggaatcctcagtcagcagtcttgctcggtttttatggtatcatcattatcatcatggcacattttaaccctctaggtggctcagatggaactttttctcagcagcaaagaattatcatatatattttgagacaaggtctcgctttgttgcccaggtgcgatcacggctcactgcattctcagcctcctgagctcaagtgatcctcctacctcagcctcctgagtagctgagactataggtgtgcaccacaacacctggctaagtttttgatggggactcttgggcttaagtaatcctcctgcattggcttcccaaagtgctgggattacaggcatgaaccactgcacccagtcaatatttttttaatgtagaagcctgatatgttatttgattttttttcttttttgagacagagccttgctgtgtcacccagagctggagtgcagtggtgcactctcggctcactgcagtccccgccctttgggttcaagtgattctcctgcctcagcttcctgagtagctgtgactacaggtgcacgccaccacgcaaggctaatttttgtatttttagttgagatggggtttcmccatgttggcaaggccggtctcgaacccctgacctcaggtgatccgcccacctcaacctcccgaagcgctgggattacaggcataagccaccgcacccgtctgttatttgattttatttttaaccttttaaagtctattgatgttcccaacatatttttccttaataaaaaacacagtctacttttattacaatgtaattacatttgcctttttaattggtagtaataaaaagtggttactttttaataggatttgtcacagtagtcagtaagataggatagttagtgctcattatcctccatacaaatgaagaaactgaaatttgataaaactgtaagctgcgtgactttggggaaaatggaacaattgggacctggacttgggtcttcagaattcacatccagtgtatgtatatcacatagccttatttagcttattagatttttaaaaaattttatcaagataaagaacaataaaagttgtggtgatctcatgttataacccctttttaataaatgtcattatagaatctaccttaacatgatgagtctgttttcatttctcagttgacaggcccattagcactgctttgatgattgtagacacaatgcattctacggaaagggaaatcctgaaggggttgcaggtggcctatatggttcctttgtgcaaattagaaaaaggccgcccctctaggggaaccagagtgctccctttctgtggtcagtcagaagaagcagctttggccccaggcaggatgatgagcttggagcatgggcatctggattgttgtctctgcttggcctcttttacgtagtgcttaaaaagcagcagccggccgggcgcggtggctggcgcctgtaatcccagcactttgggaggcccaggcgggcagatcatgaggtcaagagatcgagaccatcctggctaacacggtgaaaccccgtctctactaaaaatacaaaaagttagccgggcgtggtggtgggcacctgtagtcccagctactcgggaggctgaggcaggagaacggcgtgaacctgggaggcggagcttgcagtgagccgagatagcgccactgcactccggcctgggcaaaagagcgagactccatctcaaaaaaaaaaaaaaaaaaaaaaaaaaaaaagcagcagccaagagtcctgttcatattaactaatttgtgaggggctgggttaaaaaaaattttttttactattgtatttttagacagaccctctcgttcctccgtacaccaagtacatacctgcctcagcatctttgtacttgttcctctacctggaacctggatctcccagccttcatttcatccaggtctccactccagtggaactctgcaagcttcacctcgcctactccagtgaaagtatcaccctccgtcattctcccttcctgctgtacttttttcatagtacttcttaccacttggaatattatatttatcctcattttatttttgtctttcacagagtgtagaaagtacactctgtgaaagcagatatttctttcactgctttttcactgccatgttctagcacctggaaaaatacctggcacatagaagactctcaatatttgttgaatgattgaactaaccatgtgattactccattttcatgcagctgatgaaggctacctgagactgggcaatttacaaaagaaagaggtttaattggacttacagttccatgtggctgaggaagcctcaaaatcatggcagaaggcaaggaggagcaagtcacatcttttttttttttttttttttttgagatggagtctcactgtgtcgcataggctggagtgcattggtgcgatgtcaggtcactgcagcctccgcctcctgggttcaagcaattctcttgcctcagcctctggagcagctgggattacaggcgcacaccaccacacccagctaatttttgtatttttagcaaagacgaggtttcaccatgttgaccaggctggtcatgaactcctgacctcaggtgatccacctgccccagcctcctaaagtgctgggattacaggcatgagccaccatgcccggcctgcaagtcacatcttacatggatagcagcaggcaaagagtgagcttgtgcaggggaactcctctttttaaaaccatcagatctcttgagacttattgtctgtcatgagaacaggacaggaaagacttgcccccattcattcagttacatccgggtccctcccacaacacatgggaattcaagatgagatttgggtggggaagccaaaccttattctgcccctggcccttcccaaatctcatgtcttcacatttcaaaaccaatcatgccttcccaacagtcccccaaagtcttaactcatttcagcattaactcaaaagtccaaagtttcattcaagacaaggcaagtcccttctgcctatgagcctgtaaaatcaaaaacaagttagtgacttcttaggtacagtgggggtacaagcattggataaatacagccattcaaaatgggagaaattggccaaaacaaaggggctgcaagccccatgcaagtccaaaatccagcagggcagtcaaatcttaaagctccaaaatgaactcctttgatgccatgtctcacacccaggtcatgctgatgcaagaggtaggctcccatggtcttgtgcagctctgcccctgtgactttgcagggtatagtgtccctcccggctgctttcatgggctggcattgagtttctacagattttccaggcgcatggtgcaagctgtcagtgtatctaccattctggggtctggaagayggtggccctcttctcatagctccactaggcagtgcccmagtagggactctgtgtggggattccaaccccacatttcctttctgaactgccttagcagaggttctccatgagggccccgcccctgcagcaaacttctgcctgggcatccaggcgtttccatacatcttctgaaatctaggcagaggttcccaaacttcaggtcttgacttctgtgcacctgcagtctcaacaccatgtggaagcacccaaggcttggggcttgtaccctctgaagcaacagcccaagctgtacctcggccccttttagtcatggctggggtgtctgggatgcagggcaccaagtctctagaccacacatggcatggcgaccctgggcctggcccacaaaaccatattctcctagacctccaggcctgtgatgggaggggctgccgtgaagatctctgacattccctggacattttttccatagtcttggggattaattttgggctcctcgttacttatgcaaatttctgcagccggcttgaatgtctccccggaaaatgggtttctcctctctgtcacattgtcaggctgtgaattttccaaacttttatgttcttcttcccttataaaactgagtgcctaggaccaggcatggtggctcatgtctgtaatcctagcactttgggaagccggggtgggcggattgcctgagcctttaagatcagcctgggcaacatggtgaacctccctctctaataaaaaatataaaaaattagctgggcctggcagcatgcgcctgtggtcccagctactcaggaggttgaggcaggaaaattgcttgaacttgggaggcagaggttgcagtgagctgagatggtgccattgcactccagcmtgggcaacagagcaaaactacatctccaaacaaaacaaaacaaaactgagtgcctttaacagcacccaggtcacctcttgaatgctttgctgcttagaaatttcttccaccagtaccctaaatcatctctgtcaaggtcaaagttccacagatctccagggtaggggcaaaatgccaccagtctctttgctaagacataacaagagttgcctttgctccagttcctaacaagttccttatctccatctgagagcacctcagcctggattttattgtccatatcactatcagcattttgggcaaagccattcaacaagtctctatggagttccaaactttcccacattttcctgtcttcttctgagccctccaaactgttccaacctctgcctgttatccagttccaaagtcacttctacatttcagcaagccccactccactgttaccaatttactgtattattccattttcactctgctcacaaagacatacctgagacttgacaattacaaaagaaagaggtttaattggacttacagttccatgtggctggggaggcctcacaatcatgacagaaggcaaggaggagcaagtcacatcttacatggatggcagcaggcaaagagataacttgtacaggggaactcccctttttaaaaccattgggtctcatgagacttattcactatcaggagaacagcatgagaatgacttgtccccgtgattcatttaccttccactgggtccctcccacaacacgtgggaattcaagatgagatttgggtggggacacagtcaaaccatatcacagtggattgtgattgatggtataaattatcagctttagtatttactaccttttattgactgtttatgggcactttctgtgacataatgttatgaatattgtctaatggaatcttcataatacctttatgaggggtaaataatataaactctgttttggagttgaagaaatcccaaagctgagaaaakttaaaaacatgcccaaagtaaaatagctagtaattcaagtcattccttgagaggtagatctgataaccaaaatcaatttctaaaaattgttttagtgattcttttgggtctcataatatttttttcaaagagtgatttttaatcactgggtaggggaaagcctgaaaatacgtttacttatgttttaaggaaaaggaraggtaggatctatgggatttgaaatactgggataactcgggatcagacaaccctatttcacaatatttgtgtttttatcttaggatgcatactatgagggtcctttgggaagaagarcatgactttggggttttttttctaactgtgtaattctggagaaataacttacttaagcctgttttttcatctctaaattctggtgacagtgcctaccttataggtgtgtgcagatgatatgtatataaaatgcctggcatagtttctggagcgtgggagcttgatttcttctgtaccctgccccctgcctttttcttcctccttccagctacaagtgactaaggatccaaggaactgagggccgttttctttttttttgataacttccctctagttaaacaatcccagattttaagctgcttttggtagtatgtagacaatcaaggtaccttttagaattcacatggcatcttgtttattgctgtaattcaaggagtaattcatgtgctttgttaagtgttgtgcacatattcccttcacagactttggggtctaattcctgctttcgtaatcaaatgctgaatgaaaactgagggtcaataactgtctttatttcttacagccttctcctcatgttccgtgaaataccagtttttttttttaagtcaccaacgtgtttgccaatacatatgaatttggatgctaacagggatttcttaagcaccatcttgtaatttctataactgtcattgtgtcaacaggatagtagtgtcatttacagactcaaagactgggaattcttgaactaatgagttgttaattaaggtaggttaaaaaaaaaccaggcatttttatatgaagatactttctgtatgaaatttgattaggcagtatarcatttaactagtaagtgtgaaaaattatttactaagaagcaaagaacaggatttaaaagaagtacaaccaacttccagttatagatgtctgaggagccttttcaattatacgcagatcttctctcccttttaatatcctattatgtgccatataatgaagcaataaaaaggctcacaatttaagcattaatgattgatttaaccaaagatatataattattagcttacataaccccaaataatgatataattaacaataacataactaatgatggggggaggcactctgggagctataagagaacaaaatccttatttgccatttgcagaaaatctgtaatatcaaaaatagatgaatcaagcaattgcaagaaaagcttattatataggaaaatagaggaaacaattatcaaaatagatgaatatcagaaatagatgaatcaagtaattgcaagaaaagcttatataggaaaatagaggaaactattatcaaaatagatgaatatcaaaaatagatgaatcaagcaattgcaagacaagcttattatatacgaaaatagaggaaactaccaggtaaaacagaagaattgaaagttttttgatttttggtttttcttacattttagagacagggtctttgtctatcccccaggctggagtacagtggtacaattatggctcacttgaactcctgggctcaagtgatcctcttgcctcagattcctaagtagctggggctacaggtgtgcaccaccacatccacctaatttttagattttttataggagtctcactatgtttcccaggctggtctcaaactcccaggctcaagtgactctcctgccttggcctctcaaagcgctgggattataagtgtgagccactgtggccagcctaacagtgggaagctgttgatgctggcagtataggggtggtggggggaagggtgaaccagcagactactgtctttaagtgtttgtgggtaatgttggctttttttgagatagagtttcactcttatcgcccaagctggagtgcagtggcgtgatctcagctcactgcaacctccacctcctgggttcaagcgattctcctgcctcagcctcccgagtagctgggattacaggcatgtgccaccatgcctggctaattttttgtatttttggtagagatgtggtttcatcacatttgccaggctggtcttgaactcttgaccttaggtgatccgcttacctcggccttccaaagtgctgggattacagatgtgagccaacacgcccagcctaatgttgacttttttttgtttatatattattttgacaaaaataaaagttaactatgagaaaagaaaaatagaaatataagcaatccaaaaaagtgaagacaactcacaaaaaggaataatgtatttgcaaatcatttatctgacaaggtgcttttatctagaatgtgtaatgaactcttaaaatgaaataataaaaagaaaacccattaaaaaaatacaccaaaggctgggtacggtggcttacgcctgtaatcccagcactttgggaggcggggggggtgtggatcacttgaggtcaggagttcgagtccaacctggccaacatggtgaaacactgtctctactaaaaatacaaaaattagccaggcgtggtggcaggtgcctataatcccagctacttgggaggccgaggcacgagaatagcttgaacttargaggcagaggttgtagtgagccaagattgcaccactaaactccggcctgggcgacagagcaagactccatctcaaaaataaataaataaataaataaatgtcaagtatctgagtagacatttcttcaaaggaaatatacaaagccccaataaacacagaaaagccatcagggaaatccaaatctctctagacagataataacaagtgttgttgaggatgtggagaagtacaatacttcatacattgctgcatgtgtgaaatggtacattcactttggaaaatagtctggtagctcctaacagggttaatatagagttgtcagatgacccagcaattctactaggaggtatacccccagaagaaatgaaaacatgtctatacaaaatcttgtaggcaaatatttgtagcagtattattcatagtagccaaaaagtgaaagtctgttcatcacttgttgaaaggagaaacaaaatttggcatatccatacaatagagtattacaaggaaaaacaaatataaccaatcagttactgcttaaagaaaaagtaatttttctttctcctttgaggaaaagtttattcttttcttacctatcatgcatccactttattgtagacaaaacatgaaatstaggaaagcagaattgtgacggaatacatcatatgaccatatgagtggggactggctctgtcacccaagcctgagtgcagtggcgcttccaactcaccttcccgagtaggtgagactacaggcacacaccatcaygcctggctgattttttcatttttttgtagaaaaatggagtttctgctgggcgcagtggctcacgcctgtaatcccagcactttgggaggccaaggcaggtggatcacctgaggtcaggagttcgagaccaacctggccaacatggtgaatgaaaccccgtctctactaaaaatttgcattagccaggtgtgatggcacttgcctgtagtcccagctactagggaggctgaggcaggagaattgctagaaactgggaggcagagggttgcagtgagctgagatcacgccactgcactccagcctgggtgacagtgagactctgtctcaaaaaaaaaagaaaggaaaaatggtgtttcgccatgatgttggccagactggtctcaaactcttgaactcaaacaatttgcctgcctcgacctcccaaagtgctgggattacagaggtgagccaccacccagccatccatgtttccttttttctttctttctttttttgttttttggaagtgcaggccacacagttttgttttgttttgtttttttgagatggcttctcactccctctgtggcctaggctggagtacagtggtgcaatcttggctcactacaacctccaccccctgggttcaagcgattctcctatctcagcctcctgagtagctgggattacaggcgcgtgccaccacgcctggctaattattgtatttttagtagcaatggggtctcaccatgttgaccaagctggtctggaactcctgacctcaagtgagctgcctgcctcggcctcccaaagtgctgggattacagatatgagccaccacgcctggcccataagtatctttcaatgagttatttttattgttgttctgcttagtacagattaacccaacatttgatgactaacagccttctgtcagagtatgctgagatgttgctcgagtgtcccctcatgattttcatgttgtttgtatttatactacatacacagactgttggccactgttgctctcatctttgtatatgatcgatcaacaaggaaatgtctgttggctgggtgtggtagctcacacctgcaatcccagcactttgggaggccgatgagagtggattgcttgaggtcaggagttcgagaccagcctggccaacgtggtgaaacctcatctctactaaaaatacaacaaggccaggcgtggtggctcacgcctataatcccagcactttgggaggccgaggcggttggaaaacttgaggtcaggagttcaataccagcctggtcaacatggtgaaaccctgtctctactaaaaatacaaaattagccgggcatggtggcacatgcctgtaatcccagctacttgggaggctgaggcaggagaatcacttgaacctggaggcggaggttgttgtgagcggagatcgtgccactgtactccagcctggtcaacaggagcgaaactccatctcgaaaaaaaaaaaaaaaaaattagctggacrtggtggtgcatgcctataatcccagctacttgggagcctgaggcaggagaattgcttaaacctgggagcagaggttgcagtgagccgggagatcatgccactgacagagtaagtgagaagctgtctcagaaaaaaaaaaaaagaaagaatgaaacatctatgtggcctgcacttctttacagactaaatagaaatatagacctaatagcttgctgattggtgattgaggcttttgcctacatttcttgtttcctcttgagttttggtgttataaataaataaatggtgatttaaatgaaagtacattgtattttctgcctctgtgagttctctactggagacagtttgaatgaattgttaggagtaggcgrctttgagtcatgcttccttacatccgtctccagattcatattttggatgctttctttcattttgtgtatttttgtatttcctgccccattagcttcataaatagtcattccatgcatcttgtttgtatgtattgtttttagataaccaactaactggtccttagtttttcatcttttattttttttgagatggagtttcactcttgttgcccagactgaagtgtagtggtgtgatcctgcaacctccgcctcctggattcaagcgattctcctgcctcagcctcccgagtggctgggattacaggcatgcaccaccatgcctggctaattttgtatttttagtaggaacggggtttcgccatgttgctcaggctggtctcgaactcctgacttcgggtgatctgcccacctcggcctcccaaagtgttgggattacaggcatgagccaccttccctggccagttttttatattaataatataagagtttagattttattgggtttgtatttaaattagatcaagtttggatttgggaaccagcataactgcaagcctggaaatccttaggagattctatctgttctttgccactgagagaagtactgactattctgaaaataaggcagaatgaggccaggctcatgcgtgtaatccaaacactttgggaggccgaggtgggcggatcacttgaggtcaggagttcgagaccagcttggccaacatggtgagacccccatctctactaaaaatacaataattagccaggcatggtggtgcacgcctgtaatcccagctactcaggaggctgaggcaggagaatcgcttgaacctgggaggtgggggttgtagtgagccaagattgtgctgctgcactccaacctgagtgacagagcgagactctatcttttttttttttttttttgatatggagtctcgctctgtcacccaggctggagtgcagtggtgcaatcttggctcgcggcaacctctgcctctcgggttcaagcaattttcctgcctcagcctcctgagtagctgggactacaggcgcgtgccaccacacctggctaattttttgtatttttagtagagacggggtttcaccgtgttagccaggacggtctcgatctcttgacctcatgatctgcccacctcggcctcccaaaatgctgggattacaggcatgaaggcatgagccaccgcgcctggcaactctatgtttaaaaaaaaaaaaaaggagaacgagagtgcttagggaaattgagagcatttggaagaataggaagaatagaagcctgcagtctgtgagtgaaatgtaagggtatttgactaaccatacagggaaaagaaacctttcagagtgattaaatcctgtactcttcattttatttacacatttattttatttttatttttgtttttcttttttatctttacatgacattgaccaggctggtcatgaactcctgaccttgtataagtgtctttttgctgcataaacagagtcataggatagacattgctccaaagaagatatgcaaatggccaataagcaggtgaaaagatgctcagcatcacttgtcattagagaaatgcaaatcaaaactacactcattcatatggctgctatcaagaaggtataatagtaataaatagaaaataacaagtgttgagaaacatggagaagttggagctcttgtgcattgttggtgggactataaaatgatacagccactgtggaaaacaatatagcagttcctcaaaaaattaaaaatagggccgggcgcggtggctcacgcctgtaatcccagcactttgggaggccgaggcgggtggatcacgaggtcaggagatcgagaccatcctggctaacacggtgaaaccccgtctctactaaaaatacaaaaaattagccgggcgtggtagcgggcgcctgtagtcccagctactcgggaggctgaggcaggagaatggcgtgaacccgggaggcggagcttgcagtgagccgagatcgcgccactgcactccagcctgggcgaccgagcgagactccgtctcaaaaaaaaaaaaaaaaaaaaaaaaaaaaaattaaaaatagaatcctcatatgatccagcaattctacttctaggtttatatccaaaagaattgagagcaggttcttgatgagatatttgtatacccatgttcatagcagcattattcacagtagttataacatggcagcaacccatgtgtccatcagtggatgaatggagaagcaaaatatggtatataaaaacaagggcgtattattcagccttaaaaaggaaggaaatactgatatatgctacaccatgaatggatcatgaggacataatgccaagtgaagtaagctggacacaaaaagacaaatactatatgattccacttacatgatattcttagagtagtcaaacctatcgacagaaagtagattggtggctgccaggggctaggaggaggggaaaatgggggagttattaagtagtgggtatagaatttcagttttacaaggtaaaaatggagatggatggtggtgatggctatacaatgctatggaygtattcaataccactgaactgtacacttagaaatggttaagatggtaaatatgtatattttaccacaataaaaaagtaaaaaaataagtcataggaataaatttttaaaagctattttctacatttttcaattttttctgttttatttcttcatttatactcagtttattaaacactgtttcattgttatttttgtatattggaatgatataattcttactacagttacttgagtaagagaagaaatttttaatgtaactatatcttttctcagcataagaatctctactatcttacgcctgtaatcccagcacattgggaggccaaggtgggcggatcatgaggtcaggagatcgagaccatcctggccaacatggtgaaaccccgtctctactataaatacaaaaattagctgggcgtggtggtgcccgcctgtagtcccagtgactcaggaggctgaggcaggagaaccgcttgaacctgggaggcagaggttgcagtgagccgagattgcaccactgcactccagcctggtgacagagcaagactgtctcagaaaaaaaaaaaaaagactatctactatcccctgtctcttgccctytttagttttcccttctggcactggcattgaaacaaattcatgcagatctgtatgccttaagcagtgaaagtaatttgttcttttgccctgaacacgtcatgctaatcagaacttagtttcctcaataagtatggactaattataccagtgtgcactagagaaaatgcagaatacagcaagcggagccaacatttactctgattaaccaacactccttttgctctgtgtatcaagcaattgtgtgttctttttttttcctgccttttttccctttcactgcagtactttctgctaggttgtgctatgtctcagttgaattactactggaatttgtgtaattgtgtgtgttagataaacatctctctttttctrtatttgataggcaaaatgatgtctttatagtcttgtgggcaatattttacaaatggccttctggctgtgtatcactgctgctccatgccaaaactcctttggcttccttttcttaaactctctgtcctcatggtattattcagtttctttatacattgatcaacaagaagtttggtacctatgcatttctctttkcattattattataacatgtaactttttttctttgagttagagtctcattttgtcacccaggctgtagtgcagtggcacagtcatgttcattgcagcctagaactcctgggctcaagtgatccttccacctcagccatcctaatagctagaactataggcacacaacaccatgccaggctgattttttacaaaaatttttatagagatagagtcttgtgatagtacattagtccattttcacacggctaattaagacacacctgagactgggtgatataaaggaaaagaagtttaatggactcacacctccatgtagctaggaggcctcacaatcatggtggaaggtgaaaagcacatcttacatggtggcagacaagagagaaaatgagaaccaagcgaaaggggtttcctcttataaaaccatcagatcttgtgagacttattcactaccatgagaacagtatgggggaaaccgcccccatgatccaattatctctcgccgggtccctcccacaacacatgggaattatggaagctacaattcaagatgcgatttgggtagggacacagccaaaccatatcagatattgcccaagctagtcttgaactcttggcctcaagtgttcctcctaccttgggattacaggcatgagattacaggtgtgagccaccatgcctggccttgtaatttaacttcagtaacatgttggaataagacaaaaagattgttttggcctggtgtggtggctcatgcttgtaatcccagcacgctgggaggtcgaggtaggtggatgacttgaggtcaggagtgctagaccagcctggccaacatggtaaaaacctgtctctactaaaaatacaaaaactagttgggtttggtggcaggtgcctgtaatcccagctactcggaggctgaggcaggagaattgcttgaatcctggaggtggagcttgctatgagctgagattgcactgctgcactcaagcctgggcaacagggcgagactatgtctcaaaaaaaaaaaaaaaaaaaagattgtttttagaaaataatttgtgtataattcatgataattttatgctatccttgatacatgaagatgcttcacactgtggtaaggaccagcttttagagctctgtcatttgttcccattataggaatgccatctgtaccaagtggtagctattctgtttatactgaatatggcaaaaccatcatcatcacccctcacatatacacacatattcaacactttctgtacttggtatttttcaatttatgctgtttcggagtgtatttgcaacaattttgcaactaacaatttcatggtatagtgtaatttatagcacagtttcatatctgttagttcattttgtgcaacaactttaagagctaggtattattaatattccatttttacagctgagacatgtgatagtattttatgctcatgcttaattatacagccattccatctctttgtatgttttttaaaaatatgagctcatggccgggcacggtggctcacgcctgtaacctcagcactttgggagaccgaggtgggcagatcacctgaggtcaggagttcgagaccagcctggccaacatggcgaaaccacatctctactaaagtacaaaaatcagccaggtgtggtggcgggcgcctgtratcccagctactcaggaggctaaggcagagaattgcttgaacccgggaggtggaggttgcagtgagccaagatcatgcaactgcactccagccttggtgacaagagcaagacgacgtctcaaaaaaaaaaaaaaaaaaaaaaagaccgggtgcaatggctgacgcctgtaatcccagcactttgggaggctgaggcgggcggatcacaaggtcaggagatcgagaccatcctggccaacatggtgaaaccccgtctctactaaaaatacaaaaatattagccgggcgtggtggtgggcgcctgtagtcccagctactcgggaggctgaggcagaagaatggcatgaaccccagaggcggagcttgcagtgagccaagatcacgccactggactccagcctgggcgacagagcaagactccgtctcaaaaaaaaaaaaatctgagctcataacaaaatgatccctttcttagcatgtgatttccataaatgctctcctttctttgtcagaataaatttttttgttttttaatttttcttttcttgagatggagtctcactctgtctcccaggctggagtgcagtggcatgatcttggctcactgcaacctctgcctctcgggttaaagtgattctcctgcctcagcctcccgagtagctagggttacaggtgcatgccaccaggcctggctaattttttgtatttttagtagagacaggagtttcaccatgttgaccaggttggtcttgaactcctgaccacaagttttccaaccgccttggcctctcaaagtgctgggattataggcrtgaggcaccgcgcctggtcaaattttttgttatatttttattttctttcctatgtacttcctttcttttctctgcctgtttaccttttcagtctgatcacagagttgttccttatgtttttgaaacatcactaactgcagaataataacgatggtgatattatatattatgtagtgttttcaaactgattttacagctgaaatcttatttttatcttcacaacaggtatctgaggtaagcaagccaagtgtaaatttatttttaatttttttataaaaaatttttagagaataattgagatggggttttgccatgttattcaggctggtcttgaactcctggcttcaagcagtctgtctgccttggactcccaaagtgctgggattagaggcataagccaccatgcccagcctctttgttttttgttgtatttttttgttgttgttgttgtttttcagacaggatctcactctgtcagtcaggttggagtgtggtggctcagtcagctcactgtaacctcaaactcctgggctcaggggatcctcctgcctcagcttcccgagtagctggaactacaggtgcatgccatcatgcctggctaattttttaatttttgtagagatggggtcttgctttgttgcccaggttgatcttgaacatctagcctcaagcgatcctcctgccttggcctcccaaagtgctaggattacaggtgtgagccaccatgcctggcttgtaaatttcttgttttgctggattaaaaacttgcaatcacagtgttaactaaagttatttttggttaaaatcacataactaagtgttagcaacagaaatactcgggcttttgtgctataccaaggccctttccactgccattatgactccactttatgcatactggtataatgtaatgcagacttaacattattttctctcaagatttctttcagactttcatattaccaactacttactcagaattcagtccagagaggcagtttttcttgttgctttgtcacaaacttcctataaaaagtaattatcaacaaggcaggtcaataatttgccaaattttctttactcagcaaaacacatctttgagcagttgtccctgctcgttgttgttttgcttgtttgcccattttgtaatctgtgtaaggactctatcgatgtattatgtatctatgtattagtttcccaggcctgctgtaacaaatgaaagggcgttgaacttcattagttgtcagagaaatgcaaattaagacaaaaatgagaaatgacaagctgggtggcttaaaacaacagaaatttatgctttcatagttcaggaggccagaatccaaaattaagtggttgcagaattggttccttcttagcgactcagaagggaaatctgttccaggtctctctcccggcttctgatggttgccagcaatccttggcgttccttggcttgaagctgtgtgattttgatctctgcctccgtcttcacgtggctgccttccttcctgtctgtcttcacatggcattctcccttccctgtgtgtctgtctctgtgtctcctctgctctttaaggacagcagtcacattgtgttcagggcccactctactccagcatgacgtcatcttaacttaggccttaattacatctgcaaaacccctatttccaaagaaggtcccgtcccgttcacaggtaccagaagttaggacttcaacatatcttttaagggggacacaattcaacccattaaaatatatgttctttttcctttgtctctacttctattcttgtgatatgtttacccatgtgcttcccacaagtgtctgttgaattgatcttgtttatggatttccagtctgcccacataatttatatatacagtcgtgttgcttaacaacagggatatgttctgagaaatgtgtcatgaggcaattttattgtgcaaatatcatagagtgtacttacacaaactagatggtataggcttcctacatacctaggcttcacggtatagcctgttgctcctgggctgcaawcctgtacagcatggtactgtactgaatactgttagcaattatacaatgttaagtacttgtatatccaaacatatctaaacatagaaatggtgcagtaaaaacacaatgtaagagattaaaaaatggttccaagcacaactgcatctttaaaaaaaataaataggccaggcgcagtggctcacgcctgtaatcccagcactttgggaggccgaggcaggcggatcacgaggtcaggagatcgagaccatcctggctaacagtgaaaccccgtatctacyaaaaatacaaaaaattagccgggcgcggtggcaggcacctgtagtcccagctactcatgaggctgaggcaggagaatggtgtgaacccgggagtcagagtttgcagtgagctgagatcatgccactgcactccagcctgggagatagagcgagactccgtctcaaaaaaaaataaataaataaataaaataaaataaaataaaaaatggtatacctatcagggcacttaccatgaatggagcctgcaggactggaagttgctttgggtgagtcagtgagcaagtggtgagtgaatgtgaaggcctaggacatgaccatacacttctgtagattttagaaacactgtacactgaggctacactaaattgatttaaaaattttttctttgttcttgggaatatagaaatatacttaacctttatatgtgttgaccttttatccagaaactttgctaaacccactggttaattctgataattacatatagattcttttgaaatttctatggaaatgttcatgttatgtacaaataataacagcttatatctttgttttctttttttctttattcaatacagtatcagaggttctggtgatagcagtcattcacaatctcaaggggaaagatatcaacatttcactgaaaagtatgatttttgctatagttttaaaatacatatcctttataaaattaatgaagctccctttctgttcctagtttgctgagttggtttctttttcttaattgtgagccaatgttaaattttaccaaatgtgagttgtgcatctgttgagcaattgtagtatgatttttgtccttcattctacttgtgtgataaattacagtgattgattttcaaatatcaaaccaactttacattcctaaaataagtccaattttgtcatgtcctttttatatattgccgaattggacttgctaacatttggcttagtatatttgtatctatactcattagtgagaatggcctgtaattttgctttcttataatatccctgttagggtttggtatcaaaattatgttggcatcataaaatgagctgaggaatgttccttcttctctattctgtaagagtttatgtaagattgcctctttttcttttgtcttctttagatgttttttataaatttgacagtgaaaccacctgggtgtggagttttcattgtgggtaggctttcaattaggctgtcaatgttttagtagatctagaactcttcaaaatttctttgtgtatcaggtttagcaaaaagtgtttttctcagtgtttgtctattttacttaaatgttcacgttgatggcattaagttatttataatattccttttgtgatctttttgttttcagcagtgatactcctttttttcattcttgatattagttattctctgttgttgttttttttcccccgtgggtcattcttgccagggttttattagtctttttaaagaactaactttattttgttgactttgttgtgtttcttatttaattaatttcatctatgtaaatttattgccctctattttctttgggtttaattggctgctcttattggctgttcatttcctaacctctttttaaatgtatgtgtttaaaggccagccatttctctctaagcatagaattatctgtatctataagctttaattttcattgtgaatcagttcagaatgttttctacttttcattatgatgttttttgacccgtgaattatttacatggatatttcttaatttccaaacatgggatttttttgtttgtttgttttttgagatggagttccactctgtcgcccaggctagaatgcagtggcacgatcttggctcactgcaacctccgcctcctgggttcaagtgattttcctgcctcagcctcccaagtagctggggttacaggcacccaccaccatgcccagctaatttttgtatttttagtagagacgggatttcactatgttggccagtctggtcttgaactcctgaccccaggtgatctgcccacctcagcctcccaaagtgctgagattacaggtatgagccactgcacccacctgagaatttttttagtaatattttggctattgatttctcacttacttgcagtgtggtcagaaggtatactgtaattttaattatttgtgacatctagggacttggtttatatctagcatagaattagtatttatttacttatttatttgagatggagtatgagaattagtattaattaattaatttatttatttgaaccacggcacccgtctagaattggtctttatgattgctccatgggtatgtgaataaaaaagacatattctgcagtttgtagatgtgtggttctctatatttcagttaggtcaactttattaatggggattttaaaaatcctactatcgttagtcttttttttatgattcttttgttagttactgagggatatgttctaaaatttccccttatgattgtggatttgtctgtttcttcatttagttttatccgtttttatttatatattttgaggctatgttattaggtgcatatgatttttagaaatatattgaattggctgggcgcggtggctcacgcctgtaatcccagcactttgggaggccaaggcagggggatcacctgagtctggagttcaagatcagcctggccaatatggtgaaaccccgtctctactaaaaatacaagacttagctgggcatggtggtgcatgtctgtaatcccagctacttgggaggctgaggcaggaaaatcacttgaacctgggagatggaggttgcagtaagccgagatcccgccattgcacttcagcctgggtgataagagtgaaactctgtctcaaaaaaaaaaaaaaaagataaaagggatatattgacctgaacactttgtcactagggaatattcttctcatctatgttgattttttttttgagggggacttaaagtcagtgtcgcctgataatagcgtagctacacttcttcccttytggttgatgtttcaagatatgtattttccatactttgacttacaaccttttcaatcttttactcatgtatcagttttttttcttaaatccaatctgatggacttcatcattaaattttattacttagttcattaaaatatattgtagctactgacatattgtgttttaattttactgttacactctttgccttccatttgtcctgtcttttctatattcattcttttttttttttttttcctcctttgagattgattctcactctgtcacctaggctagagtgcagtggtgcgatcttggctcactgcaaccttcacttcctgagtggctgggattacaggtgtgtgccaccatgcctatctaatttttgtatttttaatagagatgctgttttgccrtgttggccaggctggtctcgaacacccaatccaagtgatccgcccacctcagcctcccaaagtgctgggattacaggcgtgagctactgcgctgggcctaatcttgcccttttytggggggggtggggggttataattaaaaccattctattatttgacttcattagtacttacacagtgttttacattttttttttttttttttttgagacggagtctcactctgacaccaggctggaatgcagtggtgcgatctggactcactgcaacctcctactccctggttcaagtgattctcttgcctcagcctcccaagtagctgggattacaggcacgcgccaccatgcccagctaatttttgtatgtttagtagagacagggtttcaccatgttggccaggctgttcttgatctcctgacctcatgatccacccatctcagcctcccaaagtgctgagattacaggcgtgagccacctcacccggcctttktttgtttgtttgtttgtttgttttgcaattttggctcrctgcaacccccgcctcccagattcaagcgattctcctgcctcagcctcctgagtagctgggattacaggcgtgtgccaccacacccagctaatttttgtatttttagtagagatggggtttcattcaccatgttggtcaggctggtctcgaactcctttgaccttgtgatccacccaccttggcctcccaaagtgctgagattacaggcatgagccactgcgcccagcctgcttttcttttttttttttttttaattttaatatagagactaggctgggcacagtggcccatgcctgtaaatctagcactttgggaggctgaggcaggaggattacttgagtccatgagtttgagaccaacctgggcaacatggggagaccatgtctctacaaaaaaatacaaaaaattagccgagcatggtggtgtgcctggagacccagctactcaagaggttgagataggaggatggcttgagcctgggaagcrgaggttgcagtgagccatgatcacgccactgcacaccagcctgggcaacatagcgagaccctgtctccaaaaaaaaaaaatctagagattaaggcatgctttcctgacttaaaatttagtataaattattatttttgtcactttcagaataatgcaaggacctcagcaaactttaactccatttattcccctttcaattaatagactaacattttttccattcttctgtaaaacacatacatatcttcattttataatgtcaatatttgcttatatttacccatgcatctcctttacccttgctctatatttttttcctatatctctaagtttctttttttgattattttccttttgcttaaaggacactcttccttttgttctgctggtgrtgaattccatatatatttttttcttttcttttcttttcttcgtttcatttctttcattttgagctgggtcttgctctgttgcctccagtggtgtgcagtgacactgttatagctcactgctacctcaaacccctgtgctcaagcagtcctcccacatcagtctcctgagtagctgggaccacaggtatgtgccaccatgcctggctagcttttgtatttttttgtagagtcagcgtttcactgtgttgcccaggctgatctctaacttctggactcaagtgatctgcccttctcagcctccaaagtgttgggattacaggcgtgagccactgggcccagccttgaacaatatttttttaagtttaggttttatattactttgtccaaaactattaccataatccatttcaattcataagactgaaataaatacttgaggtatttgaagttctattgaaggtttagttgaagagcaagaataaatgtaacatgggtttagcccttaaggacttttttttttttgagacggagtctcgctgtatcgcccaggctggagtgcagtcgcgcgatctctgctcattacaagctccgcctcctgggttcatgccattttcctgcctcagcctccagagtggctgggactacaggtgcccgccaccacgcccagctaattttttgtatttttagtagagacagggtttcatcgtgttagccacgatggtctcgatctcctgacctcatgatctgcctgccttggcctcccaaagtgctgggattacaggcgtgagccaccgtgcctggccaaggactttataatctggtatgacatgaggcacaggtttctgtaatattagagtagaatgtgataagtagcagctacaaggaaggatggtatatttatgaaatacttgaataggaacactgagaaagtcatgaaactcaaactatttgtcttttgcaacctagctgtattagtccattttcatgctactcataaagacatacctgagactgggaagaaaaagaggtttaattggacttataggtccacatggctgggaaggcctcagaatcatgataggaggcgaaaggtgcttcttacatggcagtggcaagagaaaatgaggaggaagcaaaagcggacacccctgataaaaccatcagatcttgtgagacttactcactatcatgagaataacatgggaaagatggccccatgattcaattacctccccgtggttccctcccacaacacatgggaattctgggatttacaattcaagttgagatttgggtgggccaaaccatatcactagcatactgaaagatttaaaaatatatatgatgatctttttggttatatattcagaatacctggctgtttgcaagacagttggaactactttgaagaaatatgccactctgaagatgtctgctgagaattatctccacaaacaatgctgttgctaggattacatattaatgccatctttatgtggccatatgtctttatcagtttcctttcactatctgccatggcttttttttttttttttcatactaagccttctaaatctggcatattttacacttatacctcacatttatagcacatctcaattcagagtagccatgtttcaagtgccaaatagtgacaaaaggctaatgactacacttttggacagtgtgtgtctagatggtgagatagacttttcaaaaaacaaataattgttatatttgttcaactctttgtgaagtaactgaagaagcccctactgacttgatcagaagtaggtgccagggaaagatttagattttcaaggaaagttttacagaaaagttgtcgtttgaatgctgtcttcaactatgaatataaatttggtaggtgtacaaaataggccaggggaatagcgtgtaaatcatgatgctgtataagagtaggatttgttcagaggctttcaagtatttccttgtggtcggagaataggtacgtgtgtgctagtggaaggtgagactggaaagatagattttgaagaatgtcagatgctagtgattcttcaccagttcttgtgttatgagtaatttaccagtaatgacagttaacctcaggataaattttctgcagtgtaattgatagatctcatagaatgaccatttaatgtcccctcatacattcagggaaacttatgggtttgaactaatttacactgcctctagcaactatgctggtttcagtgcatgttcaactgctataattagtgtagttttaatgtgctcattttgctgcattaggtttgtattttgttactgtattttactrtgtttgtattttgttcaccaattcatcattggtggttgaacatttttcttattaacattgaaatttactcctgtctagtccttagaccccattcaggccttaccagttgtctcaataacatcctttacagcagaaggatccaggggagaatcaggcattatacctcagttttcccttgtctttgaaggaaagtacttgacatttttgaagattacaggttggtyattttgtagaatgtcccccaacttggttttgtctgtttcctcatgattagactcaggctacagaactttgacaggaacagtacttctcatcgcatgggactttgatttgtctgattactaatgatgttcactttgatcatttgatcaaggcagtgtctgctggattttactgctgtgaaattactttttcccttggaagtaatgtgtagtttatgggggaagtattctgaaactatcccattcactaccacactttccatttattcactcatttatttatatctatattgattcatgatttcttattttgttcagtaggttataatccattgctattactattggtattgatgctgaaattaccctgtttggccagtgggatctccttcaagcttgatcctatgtctttttgacattctttagcattccttgagcactttcttgcttactaccacaagatattccagattgatcctgtactttttctacccstgtgctgtaattagtgaattacaattctccagagatgtctggttccttttattggagaatggtattaggggccaagtgttaggtgctagaaacgttcataccactggggagggaagatgatcactgctccaaggcgctctcagtagatagaattacagagctagggagtatgcatctgtgtgtgcttatgtagacacacacaccatgcatgtatgtccatgtcttcagaaatccatgagttcactcatacttacagtttattttttttgaaacgcagtctcgttctgtcgcccaggctgaagtacagtggcatgatctcagctcacctcaacctccgcctcccgggttcacgtgattctcctgcctcagccttcctagtagctggggactgcaggcacaccccaccatgctgggctaatttttgtattttttggtggagatgggtttcaccatgttgcccaggctggtctcaaactcctgacctcaaatgatccacccaccttggcctcccagagtgctgggattacaggcatgagccactgtacctggcccagtttcaatccacagagttcattctaacttyttccatttccatatttgcatctcccttctctgccaagtgagaactctgggtcccattgcctttaataaatcttttttaaaaaagaatttttttttttttaaagaaatggggtctcattctgtcactcaggctgaagtgcagtggagggatcatagctctctgcacccttgaactgctggcctcagtcgactctcctgcctcagcctcctgagtatctgaggtagctgagtaggcacctgccaccacatctggctaatttttacattttttgtagagacaagatctcactgtattgcccaggcaggtctcaaactcctagcctcaagtgatcctcctgcttctgcctcccaaagtgctgggattacaggcrtgagccactgcatctgcccttaatagatcttatttgatccttccctctttatatagcaaatctcccattgctgctttgaacccttctatgtggaggtgctcaggctcctactttccctgccagtcctccaccctcatgggtgccctcctcctcctccacactcggccttcaacatcctgtgcaagctggctctgcctgcgaatggcctcctcacgtagcttatattccracaaccatgcaggtaccctgtgatgtggatacccacttggtggctataagagtgaatttttcaggaagggaagagaattctgatttcctaagttttactttaatggttctagctgtgggattattttgacattctttgagtcctttcaattttaggtgttacattttctctaattctgggaaatttagtcattatttctgcaaatatttcttcactctcatttgtgtttttctctcctcctgtgtaagctattgtgtggcagttgatttccctcatttctctatcttatctcttgctttttcttttatatatttaatctctttctactgtcttttggcagagtaccccaaatctgatattttagcttatttatttgttcaactgtatcctttctgttcttcagtccatctattaaaattcattatttcaccaattgtatcacattatttcagtgactatattttgtctgcctatttttacatcctacaccaggaccaaattttcctgttgttccaggaatttctgtctgtgtgtaaacacaaatcagtttttaaaatttaggtttgtattgtacatactgtctgacaacttactgttgttttctgtttttacatggcagstttatgaaatttattacaagtggagatagtttcaatatagttttaatatacgtctgtgtgtgtacgtgtgtgtgtatgtatatgtgtgtgtgtgattttatatcccttttatactgaagtgtactcataccattgcctcaccttcttaaacagagttgtaagttagtgattgggtagagtgcagtggtcagtattcctaaccattttagtctttggggcctttaggttgttttcaatttttaaatgttatgatactaaaataaatacacggataaagtgttttcccatttgtgggatcattttccagaaggatttatagagtggatcaaatggacaaataaatcaatatttttagattgttaaccatgtagaggaatgcctagaacataacaggcattcaaataatatttattagaggaaaggatattataaaaattgctttctaatatggttccaattttcatccataccaatgataggagatgatctattttctttctttttttctttgttttttgagatggtgtctcgctctgtcacccaggctggagtgcaatggcacgtctcggctcactgcaacctccgcctccctgggtcaagcaattctgcttcctcagcctcctgagtagctgggactacaggtgcccaccaccacgcccggctaatttttgtatttttagtagagacaagctttctccatgttggccaggctggtsttgaactcctgacctcaggtgatccgtccacctcggcctcccaaagtgctgggattacaggtgtaagccactgcgcccgactgagatgatctgttttcttacagtatcttacacttaaattatatttttgtgatttgattgtaatcagaagaattctatatctgtcttggataaaaaatactatcagatgatataactaaggtttttttctatttttatttttacctcctgcatgaatgaacatatrttttcttacaggactgaatttrctcttaaagaaatcatgtcctctggaggtgctgaagatgatatcccacagggagagaggaaaacagttacagatttttgttatcttctggataaatctaagcaactgttcaatgggttaaggtgagtggactcttggtgttttgaacttttctttagttctgcatttgttttttttctggctgatgtgtggtaagtttccgaaaattatgggtagaatgtcatataaatttctgtattagagtgatcatgattttttctttgacatcatttttaaaattcttggataaaaaaacaataggaaaagaggataacttacactgttttagtcaacttaaaaagagctattttgtgaaatggttttgtatacataactcacaccagatctgattttaatctggttttgcacattagggtgttgaggtctgaggagcctaaaaatgcatatgcaattgaatgtggagcctcctattgcatttttgtaatttgtttacttgcttgtttcttttattctttctttctttgttttctgggatgaaatgtctgtgcctaaagtaatgatggttacctttgtctaccagattggggtggtgatggtggggggtgggtggaaaaagtaatgatgaggtgttataaaccatgctatttatgatttaacctgtatttcagttcttgagagtcttaggatattcactgacttcagacctaaagcttcattagcttagtaccagttagaagaaaattcatacaataggtaaaattctagggataaacaggttttatttttgaaaatttacataggaaggagtgattgtaaagatactaagttattttaaattatggtttatttatggataaaaatgaaatctttttatcttacattttacaattgtattatacatccccaggtttggacgtatactggcagggtttatttttaaaccagataatttatcttttaaaaaaattatgtgaatttttcaaataccattctgtctaaagctgcccttttaatcattctctttttcctatattcatttgatttgcttcatgacactcaccactcttaatattatttacttgcttattatgtctctcccgcattaaaatgaaatgtccctaagagcaggcccctgtttgtcactgtttctctagtttttaagcccatgtcttgcacattgtaaaggctttgtgaatatttgttaaatggaagattccaaaggcagtattcttaactcttgcactcttctgcttcctattttatgctgcagaggagatgtttgagatcatgtttttctttggctttataaattaattgtgtctttttaaagaatattttctttcactattttaattcagaagttttccttggtatgcctggggtttaaatcttttattttcctgcaatagattattttaaacctcttaaatttgcatacttagactttttttttttctctttgccttccaggtatattttttttcttcaacatttaattggcacccagtatgtaccatattctgtattgggtacgaaaattcagagataaagctaacagtccctgccctcaattactctatgaggaaattataaaaaaacaaaacccaaggcaaacttctgctcacagcaagcctcagctttagcacatccagtgaacctatttcacagataggaacacatatctgtgtgcctattgaaattaagtaagtaaaaagttagaagaggccaggcgcagtggctcacgcccataatcccagcacttcgggaggctgaggtgggaggatcacttgagcccaggagtttgagatcagcctgggcaacatggtgaaacctcgtctctacaaaacatgaaaaaattagctggatatggtggtgagtgcctcaagtcacagctgctcgggagactgaggtgagaggattgctcaagcccaggagatcgaggcttcagtgaactgtgatcacaccactgcactccagcctgggtgacagagcaagacccttaaccaaaaaataaaaacaaaatcttaaagggattatagatttaaaggtaggaaggcatttaaaagcttgcatttaaatcccttgtgtaacttctggcacatgggctctcaaacttaaaacactgacatrgttataatagctcggaccccatttttttgagacagttttatggagctatatttatatacaataaaatttgcccattcaaagtttacagttgaaaagtttggtatgtttgcagagttgtgcagctgttagtacggtttaattttagatcattttaatcacccccaaaagaaatccggttcctattagcagtgattctacattcttccaaatcctaacccctgacaaccaccaatctaatttttttctctatggatttacctattttggatattttatatattaattaattggaatcatacaatatgtggtcttctatcatggacatcttttgttaacataatgtttttgaggttcatctgtgttatagcacatatcactacttttattagtgattaatattccattgtaaggatttatcacaatttgtccagtcatcagttgatagacatttgagttttttggctatcaagaataatagtcctgtgaacatttgtatacaagtttttatgtgagcgtaggttttccttttttttgagacagagtgttgctcttgtcrtccgggctggagtgcaatgacacgattttggcttactgcaacctccgcctcctgggttcaagcaattttcctgcctcagcctcccgartagctgaaattacaggtgcctaacaccacgcccaagtaatttttgtatttttggtagagacaggtttcactatgttggccaggctggtcttgaactcctgacctcaggtgatccacctgcttcggcctcccaaagtgctgggattacgattctcttggccatataccaaggagtagaattcctgggtcatatagtaattctgtgtttaaccttttgaggacctgccaaactgttttccaaagtggcctcatcaccagtaatgtgttctagtttctcctcattctcatcaacacttactattttctgtctttttgattatagacatgctactggatgtaaatggtgtctcttggtggttttgatttgaatttccctaatgttgggcatctttttatgtgcttgttagcgatttctgtttcttctttgggaaagtatctgttctaattctttgaccagttaaaaaattgaattatttttaaaattattaatttataattgtttatatattctggatacaagtcccttgtaagatgtatgatttgcaaatatatattctcttattctgtggattgtcttttactttctttctttcttttttttgagatgaagttttgctcttgtcccccaggctggagtgtgatggtgcgatcttgctcactgcaacctccgcctcctgggttcaagtgattctcctgcytccaagcgattctcctgcctccaagcgattctcctgcctcggcacccaccgcccccctaccccgagtagctgggattacaggtgcctgtcaccatgcccggctaatttttgtatttttagtagaaacgggatttcaccatgttggccaggctggtctagaactcctgacctcaggtgatccacccgcctcgacctcccaaagtgctgggattacaggcgtgagccaccgcaaaccggcatgtcttttactttcttaatgatatcctttgaagcacaaatgtttttaattttaataaagttaaacttatcattcttttctttcattgcttgtacttttggtattgtatctaagaaatcattgcctaacttaaggtcattaaaatgtactcccgtgtttttttctaagagttttatacttttagctcttacatttaggtctgtgatccattttgagttctttttattttaattaatttttttgagatggagccttgctttgtcacccaggctggagtgcagtggcatgatctcggctcagtgcagcctctgcctcccgggttcaagcagttctcctgcctcagcctccctagtagttggtgccaccacactgtatttgttttagtagaaacgggatttcaccatgttggccaggctggtcttgaactcctaacctcaagtgatccgcctgccttggcctcccaaagttctgggattacaggcatgagccaccattcccagcccattttgagttaatttttgtgtatggagtggaatgttagttttatgttattttttaaatcagaaaaacatttccaattgttttgattattgcatatttttcattttttctttttaaacattgatacataataattttacatatgtatggggtacatgtgatattttgatacatacataccattgtaatgatcacattatggatttgggatatccatcacttcaaacatttatcatttatttgtgttgggaacattttaaatctgctctttgagctattttgaaatataaatcttatatcccaggtatagagtcgtatctttctaaggtgctgttttaaaattttacaatactaataatgataaattttgatctgtcacctggaagagtggataagcaaatataccacagatatattttcagtgttttattgagtgaccctcttcaatttaaataagatataattggctgggcatggtagctcacgcctgtaatcccagcactttgggaggctgaggcaggcagatcacctgaggtcaggagttcgagaccagcctggccaacatggtgraaccccatctctactaaaaatacaaaaattagccaggcgtggtggcacacacctgtaatctcagctactcgggaggctgagacaggagaatcgcttgaagctgggaggcggatgttgcagtgagctgcgatcacaccactgcactccagcctgggtgacagagcaagactctgtctctaagtaaataaataaataaataagccataattatttatacaaaaataggtctgtggtgagcaaactatatatcttctctgaatgcttttggatttttgtttgagagagatgtggttgtccagtatagcagccgtattgttttcttttttttgtttatataaatgaaagtatctccaggagcagtggctgatacctgtaatcccagcactttgggaggcgaaggcaggagaatcacttgaagccaagagctctagaccagcctggcgacataggaagactccatctaccaaaaatttaaaaattagctgggtgtggtggtgtgtgcctttagtcccagcaacttgggaggctgaggtgggagggtcacttgaacccgggggtttgaagctgcaatgagctatgttatgccactgtactccagcctgggcaatgcagtgagaccttgtcccttttataaaaagaaaagagaaaaaagtgttctttgttcaatattagaccttgattataaagggctgtctttatcagttttgtaggccttccttaaagttccctgtggtggtgggttggaggtgtgtattggcattcttgtctacactactctccctgtttcctgcgtaaagaagatctttgagttttgttaatcagaaacctcttttctttcgagtgttgatgttgctttatgagcatttcttgagaaagggacaagatttattttggaataattataaggtttttttggttgctatccccctgcgcccacctccacccccttatttaaattggtctgagtaggtctatggcccttatagagaagaagaaatgtattggtagtggtctggaccagcattggcatttggggaaatggaatgaagtgggatccagctggaatagtgtcagtttttaatattaagccctttccctctagcatttttttcactgttagtgcttgtctttttttttttctccttttccacatgttgtaacatgtttttctttttgcttgctttcttcaattcatgtactgtgtcttaaacttattactgaagtataattgactgcggaaaagtgcacatgctgtaagtgtgtttttaagaaactgaatacatccatgtgacttgtattcagatgaagaagtagcacacacagcacctcagaaacctcccctgttgtgttccctgttacttggactttttaactcattatgagcagagtgaaaaagggcatttcagtgcatgaaaggtttcagatttttgtatcatgtctcatttgggatataatagattctctttttacgcttggaggtgtgtctttccacattatattaagctgttcatctaagttgtcagagcctttcattttcccagctgtgaatatcttaatggagtatttttctcaactgaaaataccttcttataatatgtgcataatagtttatctcttatttccactcactgtgtaagaaaacataatccagaaaaataagaattggatgaaatgaatgatgtttcgcatataatggctcttgcatgtagttgcaataataatgaagtgagaataatgttagaaaaagctttgaatactgtcagaaaatgrtcaaaagcccaagtgcttgcagggttctggttgccatggtgactaagactgtcgaagcagaatggaatacttagtgagattatataaggcagcatctcgagacatgtatttgagaaacacagctgtgtctatcagtgatatccctaacttgcagtgttttgcaaaagcagaggcctccaagtcactaattatttgactacagaggagcaaatacacaaagccaaagaaggcttgggaggccactgatagtatatataatattattattatagtacatataatagtatatattgtgtgagtgtgtgtgtatatgtatatttttaattgggaggtgccccaaagtgaagtgtactagtcttaaatgaaaataattacagaaattatttttattaaatatgctcctagccaggtgcggtggctcacgcctgtaatcccagcactttgggaggctgaggcaggcagatcacctgaggtcaggagtttgagaccagtctgaccaacatggagaaaccccatctctactaaaaatacaaaattagccgggcgtggtgtcacatgcctgtaatcccagctacttgggaggctgaggaaggagaatcgcttgaacctgggaggcggatgttgtggtgagccgagatcacgccattgcctccagcctgggcaacaagagcgaaactccatctccaaaaataaaataaaaataaaattaaataaataaataaataaatatgctcccagtattcaacttaagaaagtttctataatgcttcctttagaagcctgtttttaggattccctttttcctaaaatggacaactgagaaattaacagtttgttccattgaccccttcttcccctcccctgcccttttcttcttcttcttctcttttcttctttcctccctcttctccttctccttcttcagaaaattaatattctcttagaggctagttctgcaaactggtaatggcaagtttattgttattgaaataaataaccatgttattttagagattataccctaaactgtctgtacaagcttgtgatataggctgtcattttatatggcttaccaccagaagaattggacttgcctttgaggtagactgccaccagagtacagtaggtatcttgatcacatgctcttgaacatcattgattgactaggctgggcatagtggctcttgcctgtaatcccagcactttgggaggctgaggtgtgtggatcacttgaggttaggaatttgagcccagcctgaccaacatggtgaaaccccatctctactaaaaatacaaaattagytgggcatggtggcacatgcctgtagtcccagctacttgagagtctgaggcaggagaattgcttgaacctgagcagcagaggttgcagtgagccgagatcacgccattgcattccagcctgggcaacaagagtgaaattccatctcaaaaaaaaacaaaagaaaagaaaatcaatgactaatagaaatttaatataagccacaaatgttattttaaattttctagccacattaaaaaataaaaagaaacaagtgaaattaattttaataatatttgatccaataaataaaaaatattctacttcatcataaatcgatagagaaatattagtgatattttacattgttttttatactaagtctttgaaacacagtgagtattttatacttacatacatttcagttcagattaactacattcaagtgcttagtagccatgtgtggctgtttgctcaggcaaaattcctcccagttttagtttctgttctcataatggctgactgtgctttctcgtgaatccatattggctattttggggttgtcttcttcactggtccatgaggtgttcccagttttgctttctttgtctcctccaacatagatgctaatagcttgcaggtcttttggctgttggtaatttgtctccaaccacctgggatttgatggttaccatattactgtatcagtttgctatggctrccataacaaggtgccatagactgagtagcttaaacaacagaaatgcattttctcacagytctggaggccggaagtccaagatcaaggtgtcagcaggttcagtttgttctgagccctctctccttggattgcagatggatgcctccttcctgtgccctcacatggtcatctttgcatgcatttgtgccctggcgcctctttgtatgtcctaatgtcttcttctaaggacgcaactcatattgtattaaaaccttccctaaaggcttctttttaattacctctttaaaggccctatctccagatacagtgaaattctgagatactgggagttagaggttgaatgtacgagttttgggaataacaattcagcccataacccttggttttattgaaatgttaccagtgggttttgctttattatctgtttgttctgcctgtgttgggaaggtatctgaatagattcaatactatgctgtcaccatttccccagaatctagaaaattagctatttaaatgctatgctaaaatattaaacaataaaatagatgaatatattctattataatataatatattctatcaaagtccatataaccaggtcttatatgttagctccctctaagatcttgtcaggtcttactagaaacatagagcatcttcccctttaaagttgctggtagaagctggatcgggaattggttaggggagaggtagttgtagttagtttttttttttttttwaatttcagtagttttttggggaacaggtgtgtttggttacatgaataagttctttagtagtgatttatgagattttgatgcacccatcacccaagcaatatacactgtacccaatgtgtagtcttgttcctcacgcccctcctaccctatcgtgagagtcccaaaagtccatgtgtcattcttatgtctttgtatcctcatactttagcttccacctatgactgagaacacatgatgtttggttttccattcgtgagttacttaacttagaataatggtctccaattccttccaggttgctgcaaatgccattatttcattccttttatggcctatctcatatatatatacacacacacacatatatatatgtgtgtgtgtgtgtgtatatatatatgagataggccataaaaggaatgaaatatatatatgtgtgtgtgtatatatgtgtatatatatgtatatatatgtgtgtgtgcatatatatatatatatatatatatatatctcacaatttctttattcacttgttgattgatgggcacttgggctggttccatatttttgcaattgcaaattgtgccattataaccatgtgtgtgcaggtatcttttttatataaatgacttcttttcctctgggtagatacccagtagtgggattgctggatcaaatggtagttttacttttagtcatttaaggaatctccacactgttttccatagtggttgtactagtttacattcccaccagcagtgtaaaagtgttcacttttaaccacattcaatagtggttagtttttaagattcttcaggaggggtatagagagaaaattaaaaagatatgttaagaaccctgaagaattcattaaatcctcaaaacaatgtcattagtgtctattattttggttctacagatgagaaaaacaaagctttgccagttaaagtcatagcctatgttaatgtgatagattataatttgagaagtgctacttccgagaagtttttcctcaatttaggagtaaggattccaaacacagacgaatgtttgactctaagaatagaggcaggccaggcacagcgactcatgcctgtaattccagcactttgggaggccaaggccagaggattgcctgagctcaggaatttaagaccagcctgggcaacaaagtgagaccccgtctacaaaataaaaaatatagctgggtgtggtagtgcatgcctgtagtccagctgctcaagaggttgaggtgagaggattgcttgaagccaggagttcaagaccagcctgagcaacacagtgagacctcatctctatagaaaattttaaaaattagctggccagatgcagtggctcatgcctataatcccagcactttgggaggctgaggtaggcagatcacttgaggccaggagtttgagatcatcctggccaacatggcgaaaccccatctctactaaaaacacaaaaattagccaggcatggtggtgcatgtctaaaaatgtcacaggatccttagggtgttatttttccagccagaaacctctgtggctagtggcacctttgcccgagttttgcttgggctcactgggcttgttcccgctactcagcctggcaggttgtgcttgacttatgctactggctcagatcccacacctgccaagggtaggccaggtatggagcagcgaggggtgtgttagcgaatgggcatggggtctggccactgtgcacagccaagcaagctagctgccgtggtggggcaggcatctccaggcactggcgccatgcaaggttgcagctggattagatgtgcctcaagcagcttccactgcaggcacccacatctggacgaggggaacatggtggtggtgcccagaagcttggagatgccaggaaccacaagccccaaagaggatgtcacaaccctggctcagggagcccataggtctgaactcccaaagggcctcagctctttccttctcattgcctacaacgtggcgagcaagggggcatgtttcagccctgtttgtgttaccattttttgagtaccagaatttgccaggtcctgagttcttgtcctgcgcccaggaagaatgaggtatgtggacaactggagggtgaacaaggtggagaggagcttcattcagtgacagaagagctctcaggagacccctagtaggtagctcctttctgcaagcaggttgtccaggcaagtgtccagctcttagcagagaggagacctgtagtagttgctccttcctgcaggtggatcatcccagcaagtgtccagctctcagcagaaaggagtgggtagctcctttctgtaggcatgtcatcccacagagggtatgagtctggctgtctggggttattttgtgctctgaatggtggaagtgtgtgctgattggtccatgggaggccacggatgggcctggaaaaagcacctcgagttctcactctgggccatggacttcaaccagaactggcagccttatccccccaggcccgcctccyatgctcgtcattacccaaagtctggagagggctgaggcagcagggggcttgtgaatcagtgccgtcatgagcacacccagtcagttgtgacaggtcccaggcttggccacaactttgctccaccccagagtgggtgccaggagctgggagaggccagggagcaggagcaggtactttcaagcatgtgggggcagggagcttcttaagaccctgagaacacagggaagcatgggtccaaagctgcagctgggtagctgcagctgcacccaggagcgctgggctcccasccctccaactcagtaggtggcccggcttccacctgttcctggcctccacccattctgtggagcatgcagccctggccacaacttccccactgcagtcggcatccctgcagcagctgctccagatgggctgccaccaccatcataatcccagctacttgagaggctaaggcgtgagaatcgcttgaacctgggagggagaggttgcrgtgagtggagatcgcaccactgtactccagcttggacaacagagtgagaccctgtctcaaacaaaaatattagctgagtgtggtgccatgcacctgtagtcccagctactcaggaggctgaggcaggagaattgcttgagcccaggagtttgaggctgcagtgagctatgatcatgtcattgcacaccggcctggaggaatagagtgagaccatgtctttaaaaacaaagaacaacaaaaaaccactgggtctaccaatgggtaaaagcaaatactggtgctaaacaaggaaatgctcaactgggctttgaagtctcaaatgcagtttggtctcgtatacacatgaacacagaaacatggtttggaacaaagatgtcccagtaatatagtcctctgtgtttaaacaagaatatgtgagtcggacagtgtgctctttgactgaaaacctgattcagagaagttggcttattcctttgcctttgaccacagctttgttggaggtcagcagcatcctaagagccagggagcaggccaggcacagtggctcacgcctgtaatyccagcactttgggaagccagggcaggtggatcacttgacgtcaggagttcaagaccagcctggccaacatggcgaaacctcatctctactaaaaatacaaagcaattagccaggcatggtggcaaatgcccataatcccagctactcaggaagytgaggcatgagaatcgcttgaacctgggaggtggaggttgcagtgagccaagatcatgccactgcactccagcctgggtgaagtgagactctgtcaaaaaaaaaaaaaaaaaaaaaaaaaaaaaagccagggagcagaatgtggtcccagaaaagaactaacaactttacttgcgtacaaaatctaggtggttattccatatggtggaaaagagcattggattaggaggtagaaggtttgaatttgaatcatagctctacagcttactggccataattcctaagtaacttcctgtatgtatgtttctttttgtatatgtrtgtgtgtgtgtgtgtgtgtgtgtgtgtgtacacacacacacacacacatactctggtggaagccatgcatttagggactggactaaggaaagagaagttaatggaagagattgtaaggacagaaaaaagagttacaagatggtgagaaagtggtgaacagtgtaatgccatagagaggactgataaagaagggactgaaagatgccccttggacttggattttaggtgtacgtagggatcaatgatcttagctaattcagtttagtaaagatgggggatttacaggaaatttacagagatttcctgagttttgatatctcaacgttatatttgaaacatccctgataatcaggtttaattatttgcactgcatttcttcctaccatagtctcctgagttctactgatagaactgaggatttcaataaagagagattagtgtcatacttttactttcctccaaaatcttggaaaaaagaatatgattagctaattcataacatagctgcctttgcaaaatgtgaaatataaggtcacttaaattatggggtaattcagagccctatttaatttaattctatggaccattaatttcccatctttgctgacagtaataatgaccaaatgatatattcagagtttaaaatcagagtcaagctctgagtagtagaggagttttttttgaaactcttcatagagtaccttagttaattttagatgctgatcatatagtggttcgtatattaacttctgtgatatgtctcattagaaaaaggatgatcataggagttttcctatggacaaattttaaaaaatttaaaccctattttgaaaaagaaactggtgtctttataactgatttaractggaatagtagatgttctaaattcttttgaggaaaatagtatagaagttagccaatgttgttcatagctataaatcagaaaatatttatatattacagcttactgttaggagccctagtatagcattttagatcactttttatgtacttttagcctgcgtacgaagtcctsttcctttataaccctttttacttgacacctgaaataaaacactggcttctagttctgttttctcccttaacaggatgtattactgagatttattaattttatcagttttggaaactcaaaggaacttgcaggcaagtgcttacttgaaaaattgcctaaagactttagatagtatccttaatgaaacacaataattgtcagttgtcacaaagttggtgttgctgacaaatgcttgtacataataatacaatcttcctaacagcagcagcttcataagagaaagtttctagcagcaacttacatttaaaaacatctgattaggtcttcctgatgtaacctctcattagagatccgtggagacataaaaaagatgaaaacttacaataaatgtgggaaactaatatccacagttaacctatttctgtaatctgaaatgaatttcagcttataaggaaaatggaaatggatttttaaaatgcagttttaaacttgctaattcttgctattgtgcctgaaaatttcaggtaggaaaatattttgctttcttatccattaacttaacatctggtacaaaaatgcagatcttttttcactcttcacttccacctacagaaattgacctttcattcatattgtgtagctattcaaatttattagtatgaagatatttattacagcatttttaaaacagggaggccgggtgcggtggctcacacctgtaatcccagcactttgagaggccaagacggcggatcacttgaggtcagtagttcaagactagcctggccaatatggtgaaaccccgtctctattaaaaatgcaaaaaaaaaaaaaattaattggacatggtggtgtgcacctgtaatcccatctactcaggaggctgagkcaggagaacgcttgaacccaggaggcagaggttgyggtgagccaagatcgtgccactgcactccaacctgggtgacagagtgagactctgtctctaaataaataaataaataaacaaaacagggaaaaagtagaaagaatataaatgttcatcaggaagatattgattaaataagttggttcattatatactactttgtacacagtaaatattgatataattctctatgtattaaagaaacccgatatattcttaaatagacatgttgcaggacattatatgtagttttatcccattgatgtaaaataatggaaaaactcatgtatatacttaaatgtgcacagagaaagaaatcattcttttttgtttgtttcttgagacagagtctcactctaactcacccaggctggagtgcagtggcacgattatggcttactgcatgcagccttgacctccagggttcaagcaatcctcccacctcagccacccaagtagctgggaccacaggcacctgccaccacacttggctaatttattgtattttcttatagagacgggctctccctatgttgcccaggttggtctcgaactcctggattcaagtgatcctcccacctcagcctcccaaagtgctgggattataggtgtgagccacagtcccctgccaaaatcattcttattggtggtgtttgtggggaataaagttgaaaggagaagcaagagagcattgttttactttttgctttatatactttatagtatttttgttttctagagacttttattattttcataattgaaaaggaaagaaacataaggtctctgtgatagattgtttgtaaaatgagtcccttccctgaatccatgcttattactagttccctgtcatactgcctctgggttgggctaatagatttgctttggccagtgggacagttgcagacataattcaaatacttgaaaaatgcacattagagcttgtcttctctattgcaagtcttaaaaccttgtaaccaagccctatataaataaacccaagctggtcctggacatttgagagaggccacagaccactagctgtctgagttgcctgagtgagatctgactgagactggcagaactgtccaactgaactcacatctaattgcctacccataaaatgattagcgactacatggtttttgttttaagcttctaagttttgaagtggcttgttatgcagcaaaagttaatcgataaagtctccagtggtgaaatcagcacctgcccttctgcatttttactgctttatgagatacccagattgctatttctttctttttctttttcttttctttttttttttttttttttgagatggagtctcgctctgttgccaggctggagtgcagtggcgtgatcttggttcactgcagcctccacttcccagattcaggcgattctccggcctcagcctcccgagtggctgggactgcagacgcatgccaccacgcctagctaattcttttgtatttttagtagagatggagtttcaccatgttggccagaatggtctgctctcttgaccttgtgacctgcccaccttggcctcccaaagtgctgggattacaggcgtgagccactgcacccggccccagattgctacttctaaaaattaagcmgaatgtaagagggggaagaaatattgtcactgtcacagtatacatactgagagctatgaaaccaatgagtaaagatcagttggccgggtataaaaaactttcagaagattgtcttctgtaataaaatgccacagatcatggcttctgtgaaagagcatagaactataaggagataacaggctaaggttaaataaagcaagaaagatgttcaggaaagcaaaaacgcagtagcaggattaaaattcacatcaaagacaatagagtagaactgatacttagacaagatgctgcrcctcagggtgatgtgactgcagactgatcctaccagtacttcaaaacatttagctagtgatattcaggaagaactgcagatgatctctcagtatcctgagaaaatgataaatatgaagtcaagagaatgaagatgacacaactgaataattaccaatatttttgatggagaattcagaaaagttgtaatggaaaaagtaaagatgaaattttaaaaaacattttacagcatttggaaaacatctaggtaagcagatcaagaagacatattcagaaaacatgctggtttgggggaaaaattatttggagacacacagctgctggccaagaaacagcagctcaaaaggaaatcataaattagatatcatggtattacaggcttggtgaactaccgatgtacactgcacccagtttatctcaagaaaaacattttaacaaaacatagcaggttgagctagccacactgataggccttgttttgtggctttctcaatgatgctttaaaaggaaacagtttcatttgaattatttcttttctttttttgaggtagrgtcttgttggactgcagtggcgcaatcttggctcactgcagctttgacctcctgggctcaattgatcctcccacctcagctccccgagtagctagcactacaggcctgtgccaccatgtctggctaatttgtgtatttttttgtagagacagggttttgccatgttgcccaggctggtctcgaactccgggctcaagtgatctgtccgccttggcccctcaaagtgctgggattacaggcatgagccactgcactgacctgttatttcttattttgatggccccaaaaatgggcacaagtaattcttttttttttcctgagatggagtttcactctcgtcgcccaggctggagtgcagtggcacaatctcggctcactgcaacctccgcttcccaggttcaagcaattctcctgyctcagcctcccaagtagctgggattataggcgttcgccaccagacccagctaatattttgtatgtttagtagagacgggttttcaccatgttggtcaggctggtctcaaactcctgacctcaaatgatccgcccgccttggcctcccaaagtgctgatattacaggcttgagccactgtacccggccaagaaattcttctataaaaccctttcagatcactaatagtcttagacagccaatgaaacagaaatacaatttccttatttaaggtgacaaaacaaatatgaccaggaaacagtctggcaagaaatacactaaaatattaaatggaattggttaggtcatgggattgttctttttcaacttgtacttttttttcttctttcttttcttttctttttttttttgtagggatagagtcttactacattgcccaggctggtcttgacctccttggctcaaatgatactctcccttcagcctcccagggagctgtgaccataggcatgtagtcctaccaggcctggctaatttttttttttttttaatcgacaaagttttgctcttgttgcccaggcctggagtgcagtggtgcggtcttagctcactgcaacttttgcctcccagtttcaagcaattctcctgcctcagcctcccaagtagctgggattatgggcgcctgccaccacttctggctaatttttgtctctttagtagagacagggtttcaccatgttggccaggatggtctcgaactcctgacctcaggtgatcagcctgcctcggcctcccaaagtgctgggattacaggcrtgagccactgcacctggcctgcctggataatttttttaaaaatgttttgaagaggtaaggtctctccatgtttcccagtgtggtcttgaacttctgggttcaagtgctcttcccgccttagcctccccaagtgttgggactacaggcatgagccatcatgcccggctacttttttcttaatgtatttatttaaaacttctttttcaaaacagcatatttatatgcatacatgcacagttatatgcttgtaagtaaataaaggtcttcacaatgaagacctaggttatttggaatagaagtggaggagacttactctatacataccttttgtgctctttgaattttatactatgtatataaattaccaattcaaaaaatgaattaaaatataactcataatttaaaaaacatgagttttacaaggtgaaataatataaaagggcttacactatgaagtagtattggctaaaacatccctctcacctggagtcctcatttttcagaggcaatcacttttgactctttctgattttrgttttcctggcatttactttcatttctcaaatatacttttatcactctttcttcgtttattaatttatacattctcctttgatatcctgccacaataaatgaagacttcatttacccaaaagctactcttttccctgccccatagaaatagtagcaggaataagaatactaatagcaactaacatttattagtgcttactttgtgccaggcctctttcaagtaatccacacatactgtctaatccccaccataccctctgaatttacgttaccactcttctcggttttcccattattcattttattttatttatttatttttaagacaggggctccctttgttgcccaggctggagtgcagtggtgcaatgatggcttattgcagcctcaacctcctgggctgaagcagtcatcccgcctcagcccccatagtagctgggactacaagcatgcccctggctaatttctttttaaagtaaaaacaagtttattagagaagtaaagaaagaaaagaatggctactctgtaggcagagcagccccgagggctgctggttggctaatttttaaatttttttgtagagacarggtctcacttcgttgcccatgctggtctcgaactcctggcctcaaatgatcctcctgccttggcctcccaaagtgctaggattgcaggcttgagtcactgtgcctggcccattattcattttattaatcatattgtcaactactggcagcacacgttttaaatgctgatcatagatgatagtattatctaacttttttgtgttttcactaggtgctgtrtattcttaggtcgttacctgtattaactcagtaactcttgtcatcaaacctatggtctaggctctattattattatctccattttataaatgaggaactaaggcataaagtttactctgtataacattgtgtagacaattagtggtaccaagccagtctgacttcaaaacccagtcctttaacccatccatacaccatattgatggtatccctttgattccattttgtaaggtaaattttcattcccactagttccatcatcttttctatgttttctttgtttctttgtttctttcwttttttctttttttaagatagagtctcactctgttgcccaggctggagcgcagtggtatgatcacagctcactgcagtcccgacctcctggactctaacgattctccttcctcagactctgagtagctgggaccacaggtgcatgccaccacacctggctaattgtttcatttttgctagagacagggatctcactttgttgccctggctggtcttgaatttctgggttcaagcagtcctcccatctcagcctgccaaagtgctgggattgcaagcattgagccaccacacccagcctctcttcttttctcatgcttagttttggtcagttatagcttcatgtttttatttcacagaacataaactgtatttaccatgctataatcatagttaaatattttgtgtttgatctatacatggattctaaaagttgaaaacagataataaacaacattttgacatataactatgtaaatattatacatagcaaagccaggagttgagaaatgatctttccttctctgtagttccagtgtatatctcaaatgaattcatccttaagttcacactcaaatggatcactcttttttacactatttgttttttgggtttgtttgttttgagacagggtcttgctatgttgcccatgctagagtacagtggcatgatcacagctcactgcagacttgatcttcgggctcaatgaatcctcccgtctcagcctcctgaatagctgggactacaggtgtgtgccactacgcctggcaaatttattttttattttttatttttgtttgtagagactgtgttttgccatgttgtccaggctggtcttgaactcctgggctcgagctgtctacctgcctaggcctcccaaagtgctgggactacagacatgaactgctgtaccctgccctgtttttcttttgtaacctctctgggttgagtcctttcacatgtagttcctttctcatgttttctaggttccagctttcttcattctgttatatggaaggcactaggctggacattttcagtttgcccttccagatcttaccttttgcctcttctcctaccctgggagactaacatttataggctgctccaactgatatctttgccctctgtcttccagctgggctacaccaatggaaagggtcagcaggaggttggagggcaggagtagagtgagcacagatgtgtattttgccagctccctcccttaagttttgggaactgccccctccctctgctgcaccaggcctaagggatagtaacttagccacaggtccttaaagtgttccttgttggtttcccttgactctgttcacatctttgtagcctctttgtcaaactcttcccagtgacccacttgtgtgtcgtctatttcccgccaggattttgattggtgggaagtaataatattgatatttcttcatataataatgatatttcttcatcaaatgttctttcagaagtttcttgaaatgtctcatctactgattgcctccctctctttttatttctgtatggagcctcgaaagagaagataaaattatatgctcagtccatcgtgtattgcttttttatttgtattactctttttaaaaacaacatctttattgggatattcagatatcttacaagttaccttttggaagtatacaactcagtggtttttagtatcctcacaggttaygtgcacccatcactacagtcaattttagaacattcattatcccyaaaagaaccctgtacccattagcagttattatctttactttttaaatgcgggaaataaacctrcatagaaagaccagaaagactttatgctcttgaactgtataaactgactccagcctacctgttgtaccttttgttgttgttgttgttgttgttgttgttataccttattttctactagttcccataatacatcatttatttaattcaggctgttttcctacttgtgctacaaagtgttattaacttataattgtcgttgcttctcttatatattttatttatctctgtctctgataatctcttaatctcttctttctcttttgcctatccaaatctttctctttgtgaagcatttcctggctactcaagccttccaatatgtaccttaaacatttttcattttaattaattgatttttttttttggagatggagtcttgctgtgttgcccaggctgaacttaaacccctggtctcaagcaatctttccgcctcagcctcctgagtagccaatgtgtcccttttctaaactccttattacttttattcagtgtcatgtaatttagtacttatttgcagttttttctacatatgtgatcatattttctgtctattacaaccaataatcctattaattgaagagatcagttttcacattactttatatggccttcataattattagcacttgatagaataatattagtaggctgggcgcagtggctcacrcctgtaatcccagtactttaggaggccaaggtgggtggatcacctgaggtcaggagttcaagaccagcctggccaacatggggaaaccccttctctacttaaaaaaatacaaaaattaaccgggcgtggtgacgggcgcctgtaatcccagctactttggaggctgaggtaggagaatcacttgaacccaggaggcrgaggttgaagtgagctgaggtcgcgccactgcactccagcctgggcaacagagtgagactccatctcaaaaaaaaaaaaaaagcataatattagtaawcaggttttctccttccattgagtgtcttcacaatatrccttgcccaacagcgaggtgggtgacaccaatagcaagatatcccaatggtgcaaaaggaaagctaaccagaggccgggcatggtggctcacacctgtaatcccagcactttaggaggccgaggcgagtggatcacctgaggtcaggagttcgagaccaccctgaccaacatggcgaaaccccgtctgtactaaaaatacaaaaattagccaggcgtggtatcgtgtgcttgcagtcccagctactcagaaggctgaggcaggagaatcacttgaacccgggaggtggaggttgcagtgagccgagatcgcgccactgcactccagcctggtgacagatagagactccatctcaaaaaaaaaaaaaaaaaaaaaaaatatatatatatatatatatatatatattcattttactattaaacatttgagtgttttctctgttctaaatatttctataggcattttagttatagggatcaatataaatatagcctgtacttcttttcttaattgaaaatagtgctaatggtggtcataggggtactgattgagacagagttgaactagcacaacaaaggtagacagataaacttagagaaaggagtagggggcccagaaacaagaacatgtattttatctggcaaccctaaatagaagagactggctctaaattgataagctgtgaatctgctgatggtacctaggggtcattgtactgttctctctacttttgtgtatgtttgaaattttccatcataaaaaaattaaaagatacaacttaaaaaatagagatacctttcacaaaaacaatgaaaatatgagaccttacagtaatgtgaaccaggaaatataggacctttatggaaagagttataaatgtatttaatgacaatgtttgtaccataaatggaaagaaatgctattgacaaaattagaaaaaatacgaattccccaaattgatctctagatttattcatttaccactaaattcaatgaatttattgctcctttatttttttaaaaaagtggccgggcgtggtggcttatgcctgtaatcccagcactttggtaggctgaggcaggtggatcaggagatcaggagatcgagaccacagtgaaaccctgtctctactaaaaatacaaaaaattagccgggcgtggtggcaggcacctgtagccccagttacttgggaggctgaggcaggagaatggcatgaacctgggaggaggagcttgcagtgagccaagatcacgccactgcactccagcctgggcggcaagagcgcgactccatctcaaaaaaaaaaaaaagtgacctcaatagtacaaatcttgtgaaatgtagttgactctttataatttgattcaagttagctccatgtacctgtagccataccctaaattctttgagacacgactgtcttctagactttgttagagataccttgagtttataaggtttctacaagacagccaaattcttaaattcctttcccaaatctgttttgtcccactgaaaaaaggtacttggggccatctccatctattcacagactttaatgaagaagttttgccctcgaagatgaggctgaattttaattggcatttatggatagcatttctcaattatatattttacagttatgcattagtaattgttgtatctttcaatcttgtaagttcttgaatttgtggattttctctttttcttttcaactccgcttgcagctaattcttttctgagttcatctttttctcattgtattttaagtgtagctaatagcatccagggctagcaacatactgtttcccaacctctttgtataaatcaacaagttcattaatcgtattatctgctttctcagttttctcaggcaaatgcagtgttaccattgcattatataggtcatcattgtttccagccttcagtaacagttacttgctactcagtcgcaattgcaggtgtcacrtatgttacatgtttgttatggcaataacgtactcctattaccagtttctggactagcttttccgaagtaaggctgctgtaacaaccctcaaattgtagtgccttcctacagtaaagatgtgtttctagctcccatgttagctacaagttgtctgtggttttggggcactgttaaatgtgtcttactcagtgttccaggctgaagaacagccctatctttgtcttaggtcagagggaaaattgaaaatgctgaaacactcagtgctcttaattttctcctaagatatgatataaataacttacaattatatttcattggccaaaggaagttaatacggccaggcccaatgtttgtatggtagggagtatttgcctctcaaagactgtactataagtcaccaggttcaaggacagggatgtatatttatcttatagggagaggatagaatagtgcagaacagtaataccatctacatatcgatttctaggtatattttctaaagcagtgtttttcaaacattcagctgagttcttagctgaagataaacatttggaagttgtcagtatataagtgagtgtgaataagatcaccgagggagagggaagagaggaccagaaacctcatgggagaagcatctgcaaagaacactaagaaygacctgtcagagaagtagggaggagaataggaaaagagcatgtcctggaccctagttatagaattatttctgcyccaaaaagtgtaacttttttaaaaaagaaagcctgaatgcaagcatttttcatctgtctggtttgtaccatcacaagacataatttccaaatagaataagaagtttaatattaatacatactcatttactattacagagatttgccacaatatggacagaagcagtggcagtcctattttggaagaacttttgatgtttacaccaaactctggaagttccagcagcagcatcggtaaatgaattttatagttaaaggagagtgaaggcctgttttgtattagtcacagtttttatcttcactacttcagtgctttttgtcttggtgctttttcttttttttcaccaacaaagcaaaggtaaatcttggtgcttttaaaataacatatttcatctttataacccaaatgaaaacaaatttatttctttcctatttatttaagatcttaaaatgtatggccaggcatggtggctcatgcctgtaatcccagcactttgggaggccaaggtgggaggattgcttgagctcaggagtttgagaccagccttggcagcatggctaaaccctatctctacaaaatacacaaaaattagccaggtgtggtggtgctcagctgtaatcccagctacttaggaggctgtggcacgagaatcgcttgaaccctgaagtgggggaggttgcagtgagcagagrttgcatcactgcattccagcttgggcaacagagagagaccctgtctcaaaaaagtaaataaataaataaaaataaataataaaataaggctgggtgcagtggctcctgtctgtaatcccagcactttaggagtctgaggtgggtggataacttgaggttaggagttcaagaccagcctggctaacatggtgaaaccctgtctctactaaaaatataaaaattagtcgggcatggtggtgcacacctgtaatcccagctattcaggagactgaggcagcagaattgctggaacctgagaggcggaggttgcagtgagcccagatcatgccactgtactccagcctgggcaacagagccacactctgtctcaaaaaaggaaaaaaaagagtaatgttcttgtccgatttttaaagacaatattatatgtggaatggttcagatcagctagagcataggtaggatgatttatggtttcattctaaaatatatgtttattggccaaagtagtttctttttatatttcaacttataaatagacatttaataaatgctttttaaatttaatggaatgactacattgaaatctaatgaaaaattcattagctttgctgaattggatggtattttatcctattgaatttacagatttgattagttttggaatttatagactcatttctattttcttgtatcctatataaaacagacaagtcttggataatcggtatggcttgaagcgctggcaaataggagaaattgcttccaagattgggcagctatactatcattattagtaagtaaattacacatggaaagagtaaagtgttgtctgattaaaacacagcatgcagaagtatacatacatagtatactcattgctaggcatgaaaatcacgagttacaaatgaaactctagtagttcggaccagattgatcaagacaatgttgtgcaataaccttccatagtcaaagtactatttgttttaaaggcttgcctcccaaacacttcatttggtcagactcatttataacttaaaaatttgatcttggttttagataaacrattaatactaaaggatttattgttcttgcagcttcacttgtcttaataatgtgtagcattgtattataacttgtatatgtgaatgaatggttttcagaaggatactttaaaaaactcatacttgcaggatatgtttgaaagatattttttattatatccttagagcactaacatctatatagtcccatccctgagttcagaaaacaagaagggtccttttaggaatctaaatgtcatcatcctgaagtgataatcaggtatacaataaaaaaggcttggaccatttgtaatctaaaaggcaataaaatggctgggcgtggtggctcacgcctgtaatcctaggactttgggaggccaaggcaggtggatcacctgaggtcaggagtttgagaccagcctagtgaaaccccgtctctactaaaaagacaaaaaaattagccaagtgtggtggcaggtgcctgtaatcccagctacttgggaggctgagggaggaaaattgcttgaacctgggaggcagaggttgcagtgagccgagatcatgccattggcactccagcctgggcaacaagagtgaaactctgtctcaaaaaataaaaaattagaaaaaagaaaagaaaagaaaaggcaataaaacttcttccatttcctacattttggcataccgctccaaattcccaccactaaaatcactctcttgggtagaatattttcttaaaaagtcccttgtaaaactagaagtgttttctcaggtagaaatgttttcttaaaaagtcccttgtaaaacataattcattaacatcccctgaagattcgtatggattagtgcattcctcagttctgtgaggacagaaattaaagaaatgggccaaaggactgtatggatttgaggaagtggcctagtcctgggagaggatttcactggatggaatgctgtttggagagtcccttcaaagaatgaggataatgtgtaatatgggttggcatcaaaaaaggcttggatgcagcgaggaggtttttaaaaaaatttcattattattttttatacattttaagggtgatatgattattgtcttgccgattcaaatttaggacagtcattcccacccccgcaccccgtgccacagaggaatacagcggtatatagaacaagtatttaccatggtgaagagtctctgacactgtcatatttaaaaatatattttttctcatagcttacgcacatcggaaaccagctatctgaatgaggctttttccttctattctgcaatcagacagagatcatattattctcaagtcaataaagaggacaggtatgtatctgctatgtttttagaaagatgaggataaaacattcagtcttaatcttcgtagaaattgtgtggaaaagcatacatttttataacgtgtactcgtttaccaggctttattgagtgcctgctatgtaatagmccttcgaaagcatagagaagtttatgttacctaagcaataaatatcaaagatgtttaacagatgtcacaatgccaaaggagggttgggttattgttttacaagagattggcttcacacagatttaatagaaaagaaatgactccaaaacaaggcttagctaataacatttattctttagccygtgtaatcttaattcatatctcttcaaaagcctggtgacaactgtcatgtaggaccagggaatagtctgttaatgctgtttgaattttctctctytttttttttttttttggaggtggagtcttgctctgtcgcccaggctggagtgcagtggtgcgatctcaactcactgcaacctccacctccacttcctgggttcaagcaattatcctgcttcagcatcccaagtagctgggattacaggcttgtgtcaccacccccggctaatttttttgtattttttagtagagatggggtttcatcatgttggccaggctggtcttcaactcttgacctcaagtgatccacccgccttggcctcccaaagtgctgggattacaggcgtgagccaccacacccagcctggattgtgatttgattacttccagatgagtatggaattgtggaagaaatcagagatcttctggagaatctttcttgttagtattctgggaactgttggatgagaaagttcaggcacagaaggtctgaatattctctctaccccagcaacacaactcacagtttttatatggtgaaaagattatattctcttagcaatagaagaaaacagttttgacatgtttttctcaagaacactttgtggttgactgttgtaagctttccaactaaacagtgacattttggggaaagccccactcttgtaaatmtccttaatttccttgcatgtcttgttcagacttgtctaggggcgtttgcatggcacatgtaaggggtgcagatgctggagtgtacatttttcatatctttttgtcatccccttacatcagaagttccatcagttacttttcccttaggttgtcctatagtttgcttcacatattttcactacagatatatttcctccaactctaatttttaaaaaaattcttggcgagataaattatatcttaaaaaatgcgaaagagctgtataacattttatcggcattaaaaatacatataagcagagaactattttaagtaatagcaaaacaccttgtataatttacttttctgcattttctaatttgacaaaagggaaattggctttaaccttaatacccaacagtttgatttattgccataattttatgccttaataacaaacatcaaatttgaattgttttcctttgcagttttctagatcagagcatattatttagaagtaggattatttggaatcaggatgacaaaaactcttgctttgtgccagtaaattagaatcaaaggacaatctggtgtgcaaaaccttgaccttgctgtgtgtagttaggaggggctttgttcagtttgtaggttgtttcttagtttacacagggtaagagtgctagtcaagattgcaatcagcaacagctgctaaaatcaagagccaggagagaaaaccaataaggaagtattccacaatttcacagttcatttaaaaggcaaaaatcttcactcctcaaaaggaacaagttctctctgcactgtcttgacagctaaggattatgtcgagaccaggaggaataagtagtttgttccagcaacctcaaggttagtgtctgtcactaagcatagaccactcccagaacatctcattccatgggtccatcctacctaggagaggagatattacatacagccactcctcctaggagctgcacaccccaattctgttgcaaatggccaaagctgaacctggttggatatggagaaggtgaagattctgaatacccaagaggttttgtggagatgttacggtgagccacctggaagaacagagtttcctaggcaaatgtatagttaaagagtcagtgtcttgtaagtagggagcctagcaggttggacaaggctagaattctggagtccagaagtttgttaagagcttaaaaaaaatggccgggtacagtggctcacacctataatcccagcactttgggaagccaaggcaggcggatcatgaggtcaggagatcgagaccatcctggttaacatggtgaaaccccgtctctactaaaaatacaaaaaattagccgggcgtggtggcacgcgcctgtagtccgagctactcaggaggctgaggcatgagaatcgcttgaaccggggaggcggaggttgcagtgagccaagatggcgccactgcactcagcctgggtgacaaagtgagactccgtctcaaaaaaaaaaaaaaaaacttcataaaaagccttcaattttacattcatatttcccactggacaaaacttgatactgtcaccacttatgttgacgttgacaacatgtcaacatgtcatttattgttcagaagaaacaataaaaggtagggggaaagtgaataataaaattatgattattacaatagaaggcaggaaaggaaaataaactccagttatgttgatgtcaacataagtggtgacagtatttttttcagtgggaaatatgaatgtaaaattgaaggctttggcactgatgataaagagggcttgatgtggacccttgcagtgagtcacactcttttttctgcagtttgatatggagtcagttggtaggctaggggttgtggttcaggttatcgggcttgattgaggtggcctcttatgtatgagtggacagcactgacgcatttaatctgtgctttgctgcagttcatcacagtggcttccaaaatagaaagcacccacccacttctgtakgcttattgaatataaggatcagctaactatggcctgtttgcatgccagattgggcccatggcctgtttttgtactgtgtggcagtttagaatttttctttytttttttttacattttcaaagggttgtaaaaagggaaaagatgaatatgctacaggcaccaaatgtggcctgcaaagcttaaaatatttaccatctggccctttgtagaaggtttgctggttgtataatccatgatayagattcatagaacctattttttaatcaaaaaagtaacagaattaagtcattcatatttcaagtttgaattgacatcatccttctactaattttctttgttttgaattccactttcgacaatatgataggctagataacctgaaatactaaacacctagaaatgctggataaaataggacaatcatccttttaaatggaaaacttagttgtcaagaaagtaaggaagtccctagttcattttcccatggctgtggtgaccttggagggtggggcaattggtttgggtgacataaaagagcaaggaagaagaaaattgaaactagaaggggaaggtatgatatacaagaaggattggtaagaaaaaattatccccttgtattctaaaacatcgatttgatggggcagtaatcatcataacaatggctgattgacattattaaaataaaatggagccaaatctagataacaataatatgaaagaagaaaggggataaagaattaaaccattctgatatccatttattcttcagaagaaacatagagtaaagtttacttgttaatattttcagaaaactataattagaatgtgtaacttcagaagaggtagagggggaaagtgagtaacaaaatgatgatcattacaatgaaaggcaggaagggaaaataaactccaaaaagtataattagcrcaaaataataaaatagaaacaaatccgaatcatggtaagtaaaaatgatctaaacttccctgttaaagacaaagattatcagtatgcctcttagaaaaacccaataatatactgtttttaagagactcttcgaggccaaragcrgtgactcacacctgttatcccaacactttgggtggctaagatgggaagattgcttgcggccaggagttcaagaccagcctgggaaacgtagcaagacccgatttctacaaaaaataaaaataaaaaaattacccaggcatggtggcacacacctgcaatcctagttactcaggaagctgaggtgagaggattgcttgagcccaggagtttgaggctgcagtgatttatgatggtgccactgcacttcagcctgggaaatagggcaagactgtctcttttaaataaataaacccttcaaagatgtaaggtagacagagaaagataatgagacagctactatggggaagaaatgtgtacgtgtatacgcatttcttatgtgtatactgtgtgtatatttaaaggtagaaagtattattgagaatagaggtttactctgatgaaaggaacaattcaggaaaatataaaaatcataaacttatatatacctaataacgtagcattatgataaagcaaagtgtttttttaaagtggggaaattaatgatctgatgtacatgggaatttttgatatatgatatctaataatttatatatcaagacaagaaattataagatttgagtaacaagtttgttccagtgtacctaaaattgtgtgcaacagtatatatgttattttcaaacttatatgaaaatctgtgaaattaactgatacttgccacaacacaagtttaatacaaggttcaataaagtgtgtgttgtctaaccatggtacgatttcattaaaaacaaaaataaaacataatttaaaaaaatcagtagctgcatttgcaggccagctactcagaaggctgaggcaagaggattccttgaacccaggagttcaagtccagttgggcaacataacaagactccatctcttaaacaaaaaaaaagtcaataagtttgtcaatcaatagacacatttctaagtaactcatgggtcgaaagaattttttaaaaattttattatggaaaatgttgaacatacacacaaaaaatacactgttgtaaggctattatttgtgatgtaggatatggaaagcaggaggaaatgtcaggtttgaattgatgattggtaagtgtaaagtgttatgtgtgaacagataaaatatattgtaagggcatttgataagttaaaggatgcacgttgttactcctagcaatcacttaaagaacaataacaaagaagtagtataactaggaagccaatagatgatataaaatggaacactaaaaaatatttgattaaccgaagagaaagcacaacaggaacaacagaggaacatagcaagagaaggagcaagtaggaaacaaatagcaaggtgrtagatataaacctagccaaagcaataatgacattaaatgtaattggtctaaaaacatcaagtaaaaggcacagagatcatattttcctgcctgtagtcttccacgcttcgttgtattcttaacttaaacatttaytactttctttaggaagccttttctcacccaagatctagtcctgtgggcacaaatagcattctttatttctcctatcattatattattccgttgtgttgtaagcatttatctctctcctgtatattttaagttcttttctgtctgtaagatctttgaagaagggaatatctctagttttttacaactgtgcttttagcaattaacagtatctgatgcatctaagttctcaataaatacttgttaaatgaatgaatatatgagtaaacagcttaataaatcagtaagaaatattttaaaaagactatatgcttatatgtgggaatgtttataattgtgcagaaaaggagggaaagagttttaaaagctatcagaaaattaaaaaaatcaaaaagcattcttttttaatctaatgagtaatttttcatttatcttccatagacctgaattggtagttaagaagttacgatattatgcaagatttatagtagtttgtcttcttctcaacaaaatggatgttgtaaaggatctggtaaaggtaaatacactttaaatagttcaaattctaatctctagttgtatatggatgatcttatttttaaaaaacagattttaggttaaaataattttgatatatcaataattacaatattcaaagtatagtaacttctgacaagggtaatgataaaaaaattttccaactcttttcatgttacaaatacactaatctgagataattatcttgattccttgcttttgtcctttctgcatgttttacatttcaaagcccatcagtggatggctgggaatgcaaacaaacaaaaattcttagtttaagagaaaataattgaaatgttatgtgaagaaaaagtacataatgctttacaaaggccttgcaaatgattttcattttcccaccactttagagtgtctgcataaagtctctccttcattaactgaggtgattaagagttaactgtcttcagacccacttaatacctgtaatcattgcatattaaattctgattgcattctgtattcaatagtttcaatggcatacttaattttgtatcaagtataacatgccagttggttttttgggttttgtggggttttttttttttctttttttttttttgagacaaggtctcgctctgtcatccagctggagtacagtggcatgatcttgtctcactgcaacctctgcctcctgggctcaagcagtcctcccaccttagcctcctgagtagctggaatcataggctcaagccaccactcctagctaatttttgtgttttttgtagagacagggtttcaccatgttgcccaggctggtctgaaactcatgagttcaagcaatccgccagcctctgcctcccgaagtgctgggattacaggcatgagccaccgtgcccagctcaacatgccagttttgacaaggccaccagaagtagctctctgttctccttttctaccttcctttatacccagttaccattaaaaatatttccaaaaaccatataatacaaatccaaataaagtcaggaagtatttttagaaatatataattttttgtagtggtagggtctcactatgttgcctaggctgctctcgaaatcttggcctcaaatgatcctcccacctcgacctcccaaagggctgggattacaggtatgagatactgcatccagcctcatttttttttattgttaaaatttttgaatttctcttttctgattctttcattaatgaattcattgctcatgtagtactgataggaagtagatctctgtaaagactttatttgatgggtgttattctgaagtttgtacttttgaagaaaatttattagttttcatctttgttttttgttataatcaggactgtgtattgctaataatcaaattttgtaagtatgtcggtttctgtcaggaatatggttctatatggctgtgtgtttttatgggttttttaataaccttttttgtgatgtttttaaaatcaggaattgtcagatgaaattgaagattatactcaccgatttaatactgaagatcaagtggaatggaacttggtgcttcaagaagtagcagctttcattgaggtcagtttttgataagaaaaatcataattattgataaataaatgaccgtgtagtttatgtttttattgtgtgtatatgtcaagaagaaggaatagcttactctattgatatttagtcttggccattygttaagttcttattgcttttttctttaggcggatcctgtaatggtattaaatgatgataataccattgttatcacatcgaatcgccttgctgaaacaggagccccattgctggaacagggcatgattgtgggacagttgtctctggctgacgcactcattattggtaattgtaataatcaggtaaagaattgtgaaggaattatgcttaaaattcactgtgaaaaatagtgctattgatgatcacagaattattttcttataaatatcctaacatcctcttgtgaggaaattgctgattaaattatgctgtgtgcatatatggaatatattacagatatttaaatagcttagaaagaatttttaataacatagaaagatactcgtgatacagtaaatgaaaataaacttgccatggagccaggaagcagaattatttcatatatgttagaatgtctatatgtatgcacacaggaaaaagacgaggaagaaatgttacaactatctaagttttatctccaaataaccaaattataggggatttttattttattttttacaacattctaaagtttccaaaatttctgacctggcacagtggctcacacctggaatctcagcactttgggaagcccaggtggttagatcacttgaggtcaggagttcaagaccagcctggccaacatgacgaagccccatctctactacagaatgcaaaaattagccagccatggtggcatgctcctgtaatcccagctactcaggaggctgaggcaagagaatcacttgaacctgggaggcggaggttggagtgagccaagatcacaccactgtactccagcctgggtgacagagcgagactctgtctcaaaaattaataataataataaagtttccaaaatgtatatgtcctactttccaatcaagcaaaaaggggcgaggagttggtgttttttgtgttttgtttttttttgagacagagtcttgctttgtcactcaggtgggagtgcagtgtcatgattttggctcactgcaacctccatctcccaggttcaagcgattctcctgcctctcagcctcccaagtagctgggattacaggcacataccaccacacccggctaatttttgtatatttagtagagatggcatcatcatgttggccaggctggtcttgaactcctgacctcaagtgatcctcctgcctcagcctcccaaagtgttgggattacaggtgtgagccaccgcacttggccaggagttgtttttgggtaaatttgtcaaaagtgaatttcaaatgttttttcatgacagagtagcaccatgatgatgagatttaatgtactagaaatgaaatttactggaaattacaccagtgaatacatttttctagatgtgttttttatacaagtttaattttggatcctatcctagcatctatcaatcacttttgttattgttaaatttttctggtatttctccatttttggcttttatgaccattattttgcaaatgtctacaacgtttttgaaattatagtawgaatatactaaatggaaatattttgaaacatttatggtttgtatagttatactatcttaaggctcggtatttttctcacttttttttaattcaaagaaaatttttctaatcagaaaaatataaattaaaaccaaatgagatatcaccgaactagatgactaaaaacaaaagagaccaagaaactgataatagcatatcctggcaactagtacaagaactgaatatttcatactatgtagaaatagaaattgatagatttactttagaaaagtgtcaggcattatctagtacagctccatatgtgcacactctatgaccaagcatttccagtattttcttattgatctgtaagagttctgaatatattctacatgaaagtcctttgtcagatttatgtgttgaacyatcttctcctactcttgtcttgccttttactctcttctgatatcttctgtctctttttctccttttctttaaacatctgttaaaatatttattagtatctacgctatgccagacgcccctgttccagatactgagattccagtgaacagaagtccttaattttaatgtagtctaatttataatttttttcctttctggtattagcttttttgtgtcctattttgagaaatcattgcttaccttacctttcatatttagatctatgatatctttgggatttattttagtgtgaagtatgggtcagattttctttctggatttccagtagacctagcaccatttactaaaaagaccatcttttccctgccacactgcagtgtcacttttatcataaatctgatgttcaaatatatttgagtctcrttctgttcctttggtctgtttgtctattatgctgatacttctgacttcattattatggcattttaataggcctcgatatattgtagtaaatgaaatactgattttttctaattttttctcttacattgattctgattcttatttccttcttcctattttgaatttaatttgcttagataactgacatttatttatttatttatttatttatttatttatttattgagacagagtcttgctctgtctcctaggctggagtgcagtggtgcaatctcagctcactgcaacttctgcctcccaggttcaagcgattctcctgcctcagccttcctagtagatgggactacaggtgtgtgccaccacgcccggttaattttttgtattttttttttgtatttattattttattttattttattttattttattttattatactttaagttttagggtacatgtgcacaatgttcaggttagttacatatgtatacatgtgccatgctggtgtgctgcacccattaactcgtcttttagcattcggtatatctcctaaagctatccctcccccctccccccgccccacaacagtccccaaagtgtgatgttccccttcctgtgtccatgtgttctcattgttcagttcccacctatgagtgagaagatgcggtgtttggttttttgttcttgcgatagtttactgagaatgatgatttccaatttcatccatgtccctacaaaggacatgaactcatccttttttatggccgcatagtattccatggtgtatatgtgccacattttcttaatccagtctatcattgttggatatttgggttgattccaagtctttgctattgtgaatagtgctgcagtagacatacgtgtgcatgtgtctttatagcagcatgatttatagtccattgggtatatacccagtaatgggatggctgggtcaaatggtatttctagttctagatccctgaggaatcgccacactgacttccacaatggttgaactagtttacagtcccaccaatagtgtaaaagtgttcctatttctccacatcctctccagcacctgtttcctgactttttaatgattgccattctaactggtgtgagatggtatctcattgtggttttgatttgcatttctctgatggctagtgatggtgagcattttttcatgtgttttttggctgcataaatgtcttcttttgagaagtgtctgttcatgtccttcacccgctttttgatggggttgtttgtttttttcttgtaaatttgtttgagttcattgtagattctggatattagccctttgtcagatgagtaggttgcgaacattttctcccatcttgtaggttgcctgttcattctgatggtagtttcttttgctgtgcagaagctctttagtttaattagatcccatttgtcaattttgtcttttgttcccattgcttttggtgttttagacatgaagtccttgcccatgcctacgtmctgaatggtaatgcctaggttttcttctagggtttttatggttttagatctaacatttaagtctttaatccatcttgaattaatttttgtataaggtgtaaggaagggatccagtttcagctttctacatatggctagccagttttcccagcaccatttattaaatagggaatcctttccccattgcttgtttgtctcaggtttgtcaaagatcagatagttgtagatacgtggcgttatttctgagggctctgttctgttccattgatctatgtctctgttttggtaccagtaccatgctgttttggttactgtagccttgtagtatagtttgaagtcaggtagcgtgatgcctccagctttgttgttttggcttaggattgacttggcgatgcgggctcttttttggttccatatgaactttaaaatagttttttccaattctgtgaagaaagtcattggtagcttgatggggatggcattgaatctataaattaccttgggcagtatggccattttcatgttattgattcttcctacccatgagcatggaatgttctttcatttgtttgtatcctcttttatttcattgagcagtggtttgtagttctccttgaagaggtccttcacatcccttgtaagttggattcttaggtattttattctctttgaagcaattgtgaatgggagttcactcatgatttggctctctgtttctctgttattggtgtataagaatgcttgtgatttttgtacattgatttttgtatcctgagacttttctgaagttgcttatcagcttaaggagattttgggctgagacaatggggttttctagatatacaatcatgtcgtctgcaaacagggacaatttgacttcctcttttcctaattgaataccctttatttccttctcctgcataattgccctggccagaacttccaacactgtgttgaataggagtggtgagagagggcatccctgtcttgtgcccgttttcaaagggaatgcttccagtttttgcccattcagtatgatattggctgtgggtttgtcatagatagctcttattattttgagatacgtcccatcaatacctaatttattgagagtttttagcatgaagcgttgttgaattttgtcaaaggccttttctgcatctattgagataatcatgtggtttttgtctttggttctatttatatgctggattacatttattgatttgcatatattgaaccagccttgcatcccagggatgaagcccacttgatcatggtggataagctttttgatgtgctgctggattcggtttgccagtattttattgaggatttttgcattgatgttcatcaaggatattggtctaaaattctcttttttggttgtgtctctgcccggctttggtatcaggatgatgctggcctcataaaatgagttagggaggattccctctttttctattgattggaatagtttcagaaggaatggtaccagttcctcttgtacctctggtagcattcggctgtgaatccgtctggtcctggactctttttggttggtaagctattgattattgccacaatttcagagcctgttactggtctattcagagattcaacttcttcctggtttaktcttgggagggtgtatgtgttgaggaatttatccatttcttctagattttctagtttatttgcgtagaggtgtatatagtattctctgatggtagtttgtatttctgtgggatcggtggtgatatcccctttatcattttttattgcgtctatttgattcttctctcttttcttctttattagtcttgctagcagtctatcaattttgttgatcctttcaaaaaaccagctcctggattcattaattttttgaagggttttttgtgtctctatttccttcagttctgctctgattttagttatttcttgccttctgctagcttttgaatgtgtttgctctcgcttttctagttcttttaattgtgatgttagggtgtcaattttggatctttcttgctttctcttgtgggcatttagtgctataaatttccctctacacactgctttgaatgtgtctcagagattctggtatgttgtgtctttgttctcgttggtttcaaagaacatctttatttctgccttcatttcgttatgtacccagtagtcattcaggagcaggttgttcagtttccatgtagttgagtggttttgagtgagtttcttaatcctgagttctagtttgattgcactgtggtctgagagatagtttgttataatttctgatcttttacgtttgctgaggagagctttacttccaactatgtggtcaattttggaataggtgtggtgtggtgctgaaaaaaatgtatattcagttgatttggggtggagagttctgtagatgtctattaggtctgcttggtgcagagctgagttcaattcctgggtatccttgttaactttctgtctcgttgatctgtctaatgttgacagtggggtgttaaagtcacccattattattgtgtgggagtctaagtctctttgtaggtcactcaggacttgctttatgaatctgggtgctcttgtattgggtgcatatatatttaggctagttagctcttgttgaatcgatccctttaccattatgtaatggccttctttatctcttttgatctttgttggtttaaagtctgttttatcagagactaggattgcaacccctgcctttttttgttttccatttgcttggtagatcttcctccatccttttattttgagcctatgtgtgtctctgcacgtgagatgggtttcctgaatacagcacactggtgggtctggactctttatccagtttgccagtctgtgtcttttaattggagcatttagtccatttacatttaaagttaatattgttatgtgtgaatttgatcctgtcattatgatgttagctggttattttgctcgttagttgatgcagtttcttcctagcctcgatggtctttgcaatttggcatgattttgcagtggctagtaccrgttgttcctttccatgtttagtgcttccttcaggagctcttgtagggcaggcctggtgatgacaaaatctctcagcatttgcttgtctgtgaagtattttatttctccttcacttatcaagcttagtttggctggatatgaaattctgggttgaaaattcttttctttaagaatgttgaatattggcccccactctcttctggcttgtagagtttctgccaagacatccgctgttagtctgatgggcttccctttgtggtaacccgacctttctatctggctgcccttaacatttcttccttcatttcaactttggtgaatctgacaattatgtgtcctggagttgctcttctcgaggaatatctttgtggcattctctgtatttcctgaatctgaatgttggcctgccttgctagattggggaagttctcctggataatatccgcagagtgttttccaacttggttccattctccctgtcactttcaggtacaccaatcagacgtagatttggtcttttcacatagtcccatatttcttggaggctttgtttgtttctttttattcttttttctctaaacttcccttctcgcttcatttcattcatttcatctttcatcactgataccctttcttccagttgatcgcattggctcctgaggcttctgcattcttcacgtagttcttgagccttggctttcagctccatcagctcctttaagcacttctctgtattggttatcctagttatacattagtctaaatttttttcaaagttttcaacttctttgcctttggtttgaatttcctcctgtagcttggagtagtttgatcgtctgaagccttcttctctcaactcgtcaaagtcattctccgtccagctttgttccgttgctggtgaggagcygcrttcctttggcggaggagaggcgctctgctttttagagtttccagtttttctgctctgttttttccccatctttgtggttttatctacttttggtctttgrtgatggggatgtacagatgggtttttggtgtggatgctgtttctgtttgttagttttccttctaacagacaggaccctcagctgcaggtctgttggagtttgctagaggtccactccagaccctgtttgcctgggtaccagcagtggtggctgcagaacagcggattttcgtgaaccgtgaatgctgctgtctgatgttcccctggaagttttgtctcagaggagtacctggccatgtgaggtgtcagtctgcccctacttggggggtgcctcccagttaggctgctcaggggtcggggtcagggacccacttgaggaggcagtctgcccgttctcagatctcaagctgcgtgctgggagaaccactgctgtcttcaaagctgtcagacagggacatttaagtctgcagaggttactgctgtctttttctttgtctgtgccctgcccccagaggtggagcctacagaggcaggcaggtctccttgagccgtggtaggctcgacccagttcgagctttctggctgctttgtttacctaagcaagcctgggcaatggcgggtacccctcccccagcctcgctgctgccttgcagtttgatctcagactgctgtgctagcaatcagcgagactccgtgggtgtaggaccctccaagccatgtgcgggatataatctcctggtgcaccgttttttaagcccgtcggaaaagcgcagtattggggtggaagtgacccaattttccaggtgccatctgtcactcctttctttgactaggaaagggaactccctgaccccttgcgcttcccgagtgaggcaatgccttgccctgcttcggctcgcgcacggtgcgctgcacccactgtcctgcgcccactgcgtgctccctagtgagatgaacccggtacctcagatggaaatgcagaaatcacccgtcttctgcgtcgcttaccctgggagctgtaggccggagctgttcctattcggccatcttggctcctccaattttttgtatttttagtagagacagggtttcaccgtgttaaccagaatggtcttggtctcctgacctcgtgatctgcgcaccttggcctcccaaagtgctgggattacaggcgtgcctcctcgcctggccaactgactttatttttatttttgagacagagtctcactctgtccctcaggctggagtacagtggtgtgatcttgactcactgccacctctggctcctgggttctagtgattttcctgcctcagcctcctgagtagctggcattacaggcatgtgccatcacagtggcccagctaatttttgtatttttagtagagacagggtttcgccatgttggccaggctggtctcaaactcctagcctcaggtgatctgcccccagcttggcctcccaaagtgttgggattacgggtgtgagccactatgctctttttcctcttctagtataaaaatccctgggctgggcgtggtgactcatgcctttgggcatggtggctcatgcactttgggaggcaaagtggggcagatcgcctgagggtcaggagttctagaccagcctggccaacatggcaaaatctgatctctacttaaaatacaaaaattagtcaggcatgatggcatgtgcctataattccagctacttgggaggctgaggcaggagaattgcttggacccaggaggtggaggctgcagtgagcccagattgcaccgctgcactgcagcctgggcaacagaagaagactccgtctctaaataaataaataaaataaaaatccaaagctgtaaaattctctttaagcattactttaattttattctacatattttgatattttgtattttttccaatcctgcttcttctataatattttatattttatattttctttcagttgaatgtattttcttatttcttttttaactcttactgacagtatattgcacatctccaacttgagtttgataattttttttcagcactttgaagatttaatttcattatcttctctcatttctgttgagaaattgtctgttagatttattagtcacatattatatccacttaaggaaatgtttctttcctctgtgtgtttttaagattttctcactttctttgattctttgcagttttactatgttatattcaggtgcagttttctttatttatcctgcttgaggttcacagagtttcttgaatctatgggtttatgtctttcatctattttgaaatatggttattatgtctctgagtattgtttcccttctgttctttctctgctccacttctaggactcagttacatgtttgtagacccgttcacagtgccacgtgtgtctgttatattcttttctgtatttttcatcattttttcctctctaggtttaagttaggctgttttctgttgacttcttttccatttcactaaccatatcttctgatgtgtttaatctgctatttaaccttttattaagtttcatatttcacatattgtctttcttagctctggatttttccatttgattcttgttttatagattaaatttttttttcctagcctgggcagcatgatgaaaccccatttctacaaaaaatacaaatatcaggccaggcagtggctcatgcctgtaatcccattactttgggaggcctagctgggtagatcacttgaggttaggagtccgagaccagcctggccaacatggtgaaaccctgtctctactaaaaataagccaggcatggtggcttatgcttttgatcccagctacttgggagactgaggcaggaggatcacttgaactctggaggcagaggttgcaatgagacaaattcgtgccactgcactccagcctgggtgacagagtgagactctgtctcaaaaagaaaaaaataaagggccgggcacggtggctcacgcctgtaatccctgaactttgggaggccgaggcgggcggatcacaaggtcgggagatcgagaccatcctggctaacacggtgaaaccccgtctctactaaaaatacaaaaaattagccgggcatggtggcgggcgcctgtagtcccagctactccggaggctgaggcaggagaatggcgtgaacccgggaggtggagcttacggtgagcagagatcagaccactgcactccagcctgggcgacagagcgagactccgtctcaaaaaaaaaaagaaaaagaaaaagaactaaaaaacaaaccttagctggatgttggtcatgtgcctctagtcccagctgcttgggagactggggtggaagaatcacttgagcccgggaagtcaaggctgcagtgagccatgattgtgccacacacttcagcctgggtgacagaagcagaccctgtcttaaaaaaaattttttttttttctttttagagacagtatctggctctgtcatgcaggtgggagtgcagtggcacagtcatggctcactgtagccttgacctcccaggctgaagtgatcttcctgcctcagccttccaaaaatgtttatgttttatagagatggggtgttgctgtattgccaaggctggtctcaaactcctggcctcaagcagtccttctgccctagcctcccaaatgttgggattataggcatgaaccacggcacctggcccttttttattttttagtagattttaattctctggcagaattctctatttcttcatttgtgttctaccatgtctattttgttgatcacacttagtagttattttaaagtccttttctgctaactatactctctagttatgctaactacaagtgtgttggtctgttctattgcttgtttctcacttttaaaattatcatattaatatttataattactatatatctgataatttgcttgcatattaatttataatcaaatcccccagcattctctttcttttctttttgttttgagacagtcttgctctgtcacccaggctagcatgcagtggcatgatctcggctcactgcatcttctgcctccctggttcagttgattctcccaccacaaactccccagtagccaggactacaggcacgccctacgcgcccagctaatttttgtatttgttagtagagatggggtttcaccatgttggccaggctcgtctcaaactcctgaccttaggtgattcacctgcctcagtctcccaaagtgctgggattacaggtgcgagccagcacacctggcctcagtttttacatttcatttattgtattttttatttttaaaagtataggtcaggtgcagtggctcacacctgtaatccccacactgtgggaggccgaggcgggcagattacgaggtcaggagttcaataccagcctgaccaatatggtgaaaccccatctctactaaaaatacaaaaattagccgggcgtggtggcgtgcgcctgtagtcctagctactcaggaggctgaggcaggagaatcacttgaacccgggaggcagaggttgcagtgagccgagatcgcgccactgcactccagcctgggtgacagagcgagactccgtctcaaatgaatgaatgaatgaatgaatgaatgtattaggttattttctacatattcctttgattggcttaatcatgattttaattacttcttctatttaagcatatgaaactaactttttttcttttaagagaccggggatgggggtgtgcatctcactatgttgccccttctttaatcccygcctcttggctggtctccagctcctggcctcaaatgatcctcccaccttggccctccaaagtgctgggattacaggtgtgagctgccacacctagacttttgcatgttatgtatgatgtttgtatcatcctgtttctgtttgctgaatcaggcgtgccttttttcttcatgcgttttatgatttttgtttctgagtcttctttgatgtaattctgtcagctagaattctgtaagacctgaattgaggatgccttcttccaacgaagatctgcattgctttttccctcaaaacttgggggcagtatcagtttttgttctttttaagtgaaaaaccttatagatttttcagccatgcaaataatgttaattcagattctcaaaccacatgagaatcagcatatggccgtgaattcttgggggagacttttcttgatctcttctcagaacaaaggctaaggtagagtttccttcatgtttatgtctctggagcagatttgtttctagtgttctcctctgaggccatatctttttgtgcatccagttttatttgggcataggtgtatgtgtgggaggggccatcttccaaccaaccaaccagttcttagccaggaggcccatgctacccttactacaggaaaacaaggcattagtgcccacttatctccttaaacctcttccccttctttaatccccgtctcttggctgggcgcagtggctcatgcctgtaatcccagcactttgggaggccgaggcaggtgggtcatctgaggtcaggagttcaagaccagcctgaccaacatggtgaaaccccgcctctactaaaaatacaaaattagctgggcatggtggcacatgcctgtaatcccagctactcaggatgctgaggcaagagaatcacttgaacgtgggaggcggaggttgcagtgagccgagattgcgccgttgcactccagcctgagtgacagagcgaaactcacatacatacacacacacgtatattaaatgagttaaatgtttgaaagtgtagttagtaatcttcataaacttattctcatcttaactaaataattcctcttcttttatttgatagaaacatgttctttaaaaaattctcatctgttttattatcatgtgtgttcctgaagttctatataagtattactgaaattggaaaaggatatagacttaaatattgtgtagtgccaaaatgtatggaagaaattactataaaatatggatcataggctgggcgcggtagctcatgcctgtgatcccagccctttgggaggctgaggcaggaggatcatctgaggtcgggagttcaagaccagcctgaccaacatggagaaaccccatctctactaaaaatacaaaattagcctggtgtggtggcgcatgcccataatcccagctactctggaggctgaggcaggagaatcgtttgaacccgggaggaggaggttgcrgtgagccgagagcgcgccattgcactccagcctgggtgacgagaatgaaactccatctcaaaaaaaaaaaaaaaaaaaaaaaaaaaaaatatatatatatatatatatatatatatatatatatatatatggatcacagttgtatttcagcatagctaattcatcaaaagttagctcttttttctcatgtagcaaggattactatcaaacttctgtgtatagaattcgggctgaaaagtcaggaatcgtggcttatgcctgtattcctagcactttgggaggctgaggtgggcagatgacttgaggtcaggagtttgagaccagcctggccaacatggtgaaaccccatctctgttaaaaatacaaaaattagccaggtgttttggcacacgcctgtaatcccagctactccagagactgaggcaggagaatcgtttgaacacgggaggcagatgttgcagtgagctgagattgtgccactgcactccagcctgggcaacagagcaagactctgtctcaaaaaaaaaaaaaaaaagaatttgggctggagatccttgtggtgttagtgaaaaacttgcccctcacatagcacactacctacacgtgtgaattcatccaccagtctgtggaggttaacatgtttgtagaacctaatatagtctctgtgctgctgctgctttattttttttgagacagagtctttctctgttacccaggctggaatacgatggtgcgatttcggttcattgcaacctccgcctcctgggttcaagcgattcttctgcctcagcctcctatgtagctgggattacaggcatccaccaccacacccggctaatttttgtatttttagtagagatggggtttcaccatgttggccaggctggtctcgaactcctgacctcaggtgatccacctgccttggcctcccaaagtgctgggattataggcgtgagtcaccatgcatggccccctgtgtttctgtaactacttaaaaaaacaaaacctgaggaagtttattgattagtaaacatgtatatggctggagaggtatgtgaaaaagcaaatataaaaaatgcttattataggatctagatgatgaacatatggatgtcactgtagaattcttccagtctttccatcgcttgaaaatttctgtaacgaaatattagagaaaaaggtacccaaagccctgaagtacatgtgaaagtcacaactagtaacgtgataaaagtctttaaagtctgcgtgttgcattaaggctaggttgtgtttgtttttttttttcttgcaggttaagttcagtgaactaactgttgacatgttccggatgttacaagctctggaaagggagccaatgaatttagcttcccagatgaataaaccaggaatgcaggtaatctcctcttttacatttgcaagtttggtaaccctctggctgcgtctctcctgttggaacgctgattattcaacagatactacagccttgaataaagaattcacttgatgagacatggagaaatagatcatcacagtaagactgagtgtgaaaataagacttccttgataagggctagtgaaaatagatattgataattcatttgtcaaatgcagcttttatgtataatgttttctgtgtgtaaatataggaatcagctgacaagcctactagacgagaaaacccccacaagtatctgctctacaaaccaaccttcagccagctatataccttcttagcagcgtcttttaaggtatgtgtgatccagtactttttactatgaggtgaaagtgtgccctaactaaaatctaagagtcactcttttgaaaaaatacttaagagtttaggtaaaatataaaaatgaaaaactgcctttagagtaatgatcctgataatagatatttttgttttgttttgtttctttttttttttttgtactcctggtaagctgtgaaatagctgtttgggaatgaaaattgcttatgatgttgtgattattcccatcattaattaatgataatagtggttctccttcctccagttttttattactcaatgattttaggtgtaacaatgcagaattggccaggcgtggtggctcactcctgtaatcccagcactttgggaggccaagccaggtggatcacctgaggtcgggagttcaagaacagcttgaccaacatggagaaaccccatctctactaaaagaatacaaaattagccgggtgtggtggcacatgcctgtaatcccagctgcttgggaggctgaggaaggagaattacttgaacccgggaggcggaggctgcggtgagccgagatcgcgccattgcactccaacctgggcaacaagagtgaaactctgtttcaaaaaaaaaaacagactaaaaaacaaaagcagagtgtctaggcttcttatatagtcaaggagctctatgaaacatttagatcatctgaaagaactgtgagaaataggagaattcttcccaaagtctatgtagagaaagccacagaagggactttgtcttgtagccatgtagtcaggatctttacttctccattcaagttttcggagaatattctccaaatgatggggtttttgaagcagagaatgtctttgcaacttttgacaatatagattaataatgaatctctgccgtgtgtatagttttaaagtcaggaccaagaagagcgtttcttctcttggaaaagacaacagtgcattcttatttatttcacaactttaagatgtcatgaactttaaataaaaccatgttgtttatccttgtttgttgttttgtgtatgtgattttctttcatttcaggagctgcctgccaatagygtgcttctgatttacctgtcggccactggcgttttccccacaggtcgttctgatagtgaaggtacaataaaggaatgctccctgttgtgagcagggcttgaattctctttattttctacaagacgatggcccgtagcccacagaccatctcagcctttctagacagacttccaaatttgaaacctggtctatttgttgattgataattttgtagataccccagtctgtcatattttctgaaatgttatatgtcaaagcccataaatcatcagaaaattcatatattaaatgcttgcttcactatcaaatgtatcaaaagcataatatgtaaatacatttagatatacataaggagtttggtgtttcaaagttgaaaaggatgatggaataaccaagcgtaatgatctatttcacatcattgaatttttctgagctttcagtgcattggggaatccggtcaatggctacatgatggctgaaagtctttgtagaaatcagtgtactttcgtaactgtgaaagttcaagcccttgtcatgattttgttttctgtcctttattttgttttatggattcaatctgtagaatatcgggatgctgtttcagaataaaaacgtaacactgtccagaacataccagtccagaaattggtcagaatagataagtaacttggatgtaaataagataattaaatatttgcctgggcaaaataaaaaaataaaaaaattcttaacatccttaacattttcctcttcatttgtttgttgaaatttgcattcctttataaaatgcatgtccttgccatcttccttgcatgacctccagattctcttaaaatgttgaaatgaaaacaaatctctttagccttttcattgcagtgatttttttaagaagtgaaatataatacaacattaaaagtaatgtaaaatcttaaactactttagttttttgtaataatgttagtacttttatttataattatctgtatgtctcatatactgttaaatcaagttttcttggtttccgcttaacatactgacttctttacttttttcaaagtatgataggtaatcgtactttgataggtcctttgagagagattatctgaacatcccacagttgctgttccatttggacaagagtttagctaattcatatgaatttagtgggaaaaggctaacttcagaaccagaactaaagtgcttgatacaatagtgataataatggatatttgcacgctgaaatctggcaatacattcttaaaggtgaagtttttgtgaatgagaattttcaaattctattcaaatatttttctaagttttacagttagtggctcatttaaaattgtatttacttatgagactaagatttcattctttaaaaaaaaaaaagcttattttattctgcaacttctttttttttttctgagacagggtctcactctgtcatgcagactggagtgcaatggtgtgatcatagttcactgcagcctgggaatacaggcacctaccaccatgctcggctaatttttaaaatttttttgtagagacaggtctcactatattgcccaggctggtctggaactcctggcctcatgcagtcctcctgcttcagcctcccaaagtgctgggattacaggcatgagcaaccatgtctgaccaacttccttttaaaataatattgttaaacctgagattttaagtttgcttgaaatgtaaaggtcattttgaacatcccagatctccattccttttattacttagaataatgatgccatagagtcttgttttgtttctcattatattctgtttgaagaactgctgaataattaaatgttttttaaaatgttgaaaatgacaacatactgaagtcatttaaatactccattaaattaaaatgttaaattttaaaataatttaaatgtgtaattatcttcgcttgaatcaatgagagattcacacagtacctttgtatttgaacatcaggtcagtgttagtcttcaactgaagtctaggattcttccctttgtttttataggtccttatgattttggaggtgtacttactaatagtaaccgggatattattaatggagatgccatccacaaacgaaatcagtcccacaaggaaatgcactggtatgtattctggtgtctactcttattataaaaattatacctctgtctataaatagaaaaaatattaagtaaaatggggagttttttctagtactagaatgattcccttagactaagatttagggacagaccagaaacacttatttggattccagcaataattcaggctctgtctatcctaggaaattagaacttttggttgatattcattgaataaatatgttacacactgtttagtcactagggatatgtcagtgaacaaaattgcattctagttggagacagtaaatatatacataaataaataatatgtcaggacattatacatgtaacatcaatacgaacttttaaacaaatttttttcttgagatggagtcttcctctgtcactcaggtcagtcttgatttcctggccttaagtgattctcccacctcagcttcacaaagtgctaggattacaagatgtgagccactgtgttcagcccaaacatttttttttttttttgagatggagtcttgccctgtcacccaggctggagtgcagtggcatgatctcggctcactgcaacctctgcctcctgggttcaagcgattctcctgcctcagcctcctgcgtagctgggattacaggcaccagccaccatgcccggctaatttttgtatttttagtagagatggggttttaccatgtttgtcaggctggtcttgaactcctgaccttgtgatccacctgccccggcctcccaaagtgttgggattacaggtgtgagccaccgtgcccggccacattttattttattttatttttttaattgaaaaataatcattgtaaatattcctggggtacttaatgatgtttctatatttgtaatgtattgtgatcagatcagagtaattagcatacttatcatctcaaacatccattccttgtgttgggaacatttaatatcttttttctagctatttatgataaaggctgatagcagtggctcacacctgtaatcccaacactttgggaggccgagatgggtggatcacttgaggtcaggagtttgagaccagcttggccaacatgaaaccctgtctctaccaaaatacaaaaattaaccgggtgtggtggcttgcgcctgtggtcctacctactcaggaggctgaggcaggagaatcacttgaacccattaggtcgaggttgcagtgaactgagattgtgctccagtctgggtgatagagcaagactctgtgtcaaaaaaacaaaaaagagaaaataaaaactatataacatattattaactatagtcatgctacagtggtatagaacactagaacatattccttctatctagctgtaattttttaatctttaacaatctcttccctatacctccgttccccgttcccctacccttcccaacctctagtattgagtttgttttttttttgagatggaatcttgctctcatgcccaggctagagtgcagtggcacgatcttggctcactgcaacctccatctcccaggctcaagtgattctcctacctcagcctcccaagtagctgggattacaggtggccaccaccacgcctggctaatttttttatttttcatagagatggggtttcgccatgttgaccagtctggtctcgaactcctgaccttagcctcggcctcccaaagtgctggaattacaggcatgagccaccgcgctgggcctgaattttttaatacaaggttttgttggtttaatatagcacaaatgaatgttgttacatgattacaaatagaacttcaggccaggagcagtggctcatgcctatgatcccaacattttaggaggctgaggtaggaggatcacatgaacccaggagtttgagaccatcctgggcaacttagtgagactctgtctctacaaaaacttaaaaaaaaatttttttaaatgcaaaaaatacaaaagcaaatagaatttcatctacaaaagttctttttcttttttcttttcttttcttttttttttttttttgagacagagttttactctgccgcccaggctggagtgcagtggcactatcttggctcmctgcaacctctgccttccgggttcaagcgattctcctgcctcagcctcccaagtagctgggattatagtcatgcatcaccacacccagctaatttttgtatttttagtagagatggggtttcaccatgttggccattctggtcttgaaatgctgacctcaagtgatccgcctgctttggcctcccaaagtgctgggattacaggcgtgagccaccgtgcctggagttcattctttttctaagcataacaacttcattgcttgggctgttattggctcattggctctagaatttttctagctgagagcaatctggttataaagaaaactggactggtctaaaactttgtttctaatacatattgaatatcccttatctgaaatatgtgggaccaaaagtgtttcgggttttggatttttccagattttggaatatttgtatatagatagtaaggtaccttagggatgggacccatgaaattgacttgtgtttcatatacaactcatacacattgcctgaaagtaattttatttttccctttgagatcctggataaactatgtgttgtgcacctgcatgactatgatccatcatgtgaggtcaggtgtggaattttctacttgtggcatcgtgttggctctgaaaactttttggattttggagcatttttcgttttggattttcagattaggaatactgaacctgtatggcatgatcacttatatgtggaatctgaaaaagttgcactcagaagcagagtgcaacggtagttctgaggagctgaggattggggaaaatagggagatgttggttaaagggtgcagcctctcagttgtaagataaatatcatttaaagtacagcatggtggtgataattaaaaatactatattggctgggtgcagtggctcaggcctgtaatgtcagcactttgggaggccgaagtgggcggatcacttgaggtcaggagttcgaaaacagcctggcaacatggtgaaatcccatctctactaaaaatacaaaaaattagccgggtgtggtggcatgtgcctgtaatcccagctacttgggaggctgaggcaggagaattgcctgaacgtgggaggcggaggttgcagtgagccgagatcataccactgcactccagtctgtgtgacagagcgagactccatctcaaaataaataaataaaaaaaaataaatgaaaatactgtattgttggaccgagcatggtggctcattcccgtaatctcagcactttgggaggctgagatgggaagattgcttgagttcaggagttcaagaccagccttggcaacataagaggatcttgtctctactaaaaatgtaaaaaatgagccaggcgttgaggtgcacgcccatggtcccagctacttgggagactgaggcaggagtatcacttgagcctgggagatcgaggctgcagttagctatgatcttgccactgtactccagtcttggtgacaaagtgagaccccatctcaaacaacaacaataacaaaaattgttgtttactcgaaattttctgaaagagtaaagcttatgtgtcctctctgcccactgcccccagcaccacccccccacccccgccccaccgcccacacacacgaagggtaacggtgtgggaatggaggtgttgattaatttgatcgtggtaatcactatacatgtatgcattaacaagtcatcacattgtataccttgaatatatacaatttttatttgtcaataaaagaaaaacttttatttgaaatataatgaagtttgatgatattgctcagtgaaacattcataaatttacatttacattagtatctatccacatatgcacatcgtgtactcagtcatcggaaagagcacgcacaccaagattctgaccttacgcattggctctcacatgcatgttactggatttccgcctttgggttcagtagctcttctgtgggccagtcaaactgcatgtttaacaagcccttgatgcaaatgtttagaggaaacatatggtaaaaagtagctgggcacagtgactcatgcccataatcctagcactttgggaagctgaggtgggcagattgcttgagctcaggagttcgagaccagcctgggcaatatggagaaaccccatctctactaaaaagagaaaaattagctggttgtgttggtacatgtctgcagtcccagctactcaaggaggctgaggtgggaggatcacctgagcccgggacatggaggttgctgtgagctgcgattgcacaacaccactgtactccagcctgggccacggagcaagacggtgtctttaaaaaaaaaaatagtgatagtaaaaagattttcctacttactacctgcagtattaagatgtagcctgaaatattaaaaatctttaaaatagaaattttgaagactcattgaaatacaaatctggttttgttattacatcttgtttccagatgttcttacaaggagcttttaaatatgaaacaggtatctgtttgccagcttctgaggttttcatgctgtgtgtttagtcatctttaaatacacagacttcactttagcttagatattcttgaataacaattgtctctgaacttttttttttttctccaaatagaactatcttggctatcctagtaaatacaggctttttttcccctttgcttaactagtctttgtttttctctcagtgctatgatgcaaaggagatatgagcagaccaaactgaagaataagatttctgagatgtggctgacacagtttaacagttcttcrttgttgttttcccagccttcatcccggggatctctatcctttcaccaggaagccactgttcatcattgtggattcgtctaatagtgttgcgtataaggtgagttccatgagagctattgcacaggtagacattgtggcaccaacccaagggtacccactcttaatgtgtgcctttttattttgctttattttatttaattttacacagtttgtatttagtgtttcttttcttttgaggttgtgcatgctagtcaggatcgggtgctatgaatagaaacaagaagaaaacgcatgaatggacactcagtggaaaataataaatcctcctgcaggaaaaaaaaattcaagatttccaagatctctggtgggaggtttatttttgttatataacccagaataattttcttttatagaggtagaggtataagggtgaatttctctagtgttcaaacgtttccccttctcatgctgagctgctgtagtttaagtaaaacttctagcccatagttttagtctttgaatattaacatactgttttacatgcacttgattttttgaaaatttgtgacaatcacaaaaaaaagatggccctgaatgctgaaataagtgacagggatctaacttgaacatccttcgttttatatttcactattgaagtgatgattttcagtgattttataaagaatgccagtggtcagctgggtgcagtggctcacgcctgtaatcccaacattttgggaggccgaggcgggcagattacctgaggtcaggagttcgagaccagcctaaccaacatggagaaacccccatctctactaaaaatataaaattagccaggcgtggtggtgcgtgcctgtaatcccagctacttgggaggctgaggcgggagactcacttgaacctgggaggtagaggttgtggtgagctgaaattgtaccattgctctccagcctgggcaacaagagcaaaactccgtctcaaaaaaaaaaaaaaaatgccagcagtgaaacactttaaaggtggatattataattcaaactatagtaatttacaggaaaacgaaagcacagtctttagagtcctttgtatctggtcaaaatgtttgattagtgaaaaatgtgttcaaaatattctgggtgcacagatctgccacttcaaactgtttctgttgtgggtgttcatactgcagttagagggagaagcaaactcctgataggtttctatcaggaaaccaatgaaaatgtctggtagccaagagagctgaccccaagtatacattttccatttagttttcatgtttagttttacttaaactctttattccaagagcttccaatgcaccatacatttttcagcatttttcctcctactcattttgttcagtattacaacttctgatttttaggaaagttagcagtgtactttcttttcttttcttttttgagacagagtttcgctcgtttcccaggttggagtgcaatggcatgatctcagctcactgcaacctccgcctcccaggttcaagcgattctcctgccttagcctcccaagtagttgggattacaggcatgcgccactatgcccggctaatttttagtatttttagcagagatggggtttctccatgttgctcaggctgttctccaactcctgacctcagatgatccacccgccttggcctcccaaaatgttgggattacaggcgtgttccaccgtacccagccagcagtgtactttcttaaattgtatatttgttttgtttttgtgggaaatggaagaatgtgagargctgctgaatgaaaaggtttattggctaccccaattaaacttataaagccagaggggtccaggcattttgtgtcttcacagaattcaaaagaagtactctgtctttgtcaatgaaaatgaatttgttgcagcagtttggtgatgtgacagaatgtgtttttgcactgggtccaatgtattgtttaacatgatctagcatcattgagagtactttagcaatccattagtttctcccaatttaattgggcattattggataccacttctcagcaataccattcattgtatgtgcctgctatttccagaggactatttagatttaggatgaatgttggatgccgacttttaaagacaccattgtgtataattggaaatgtatttgctcaagtaatgcatcatggcttaattttagattttaatattgtgatgcacaggacagctgtggaataatagcaagtcttttgttgttgttgtttgcttttgatggcacaggcactgtcactcctctgaagaaataaatcgtccagaacataccaatcttcagaaatgaaaagggaggccaggcgtgcagtggctcatgcctgtaatcccagcactttgggaggctgaggcgggcggatyacttggggtcaggagttcaaaaccagcctggccaacgtggtgaaatccygtctctactggaaattaaaaaattagctgggaggggtggtgtgcacctgtagtcccagctacttgggaggctgaggcaggagaatcgcttgaacccgggagatggaggtttcagtgagccaagatcgtgccattgcactccagcctgggtgacagagtgagattctgtctcaacaaaaaaaaaaaagaaatgaaaagagaaccccatatggagtaggcaaatcagatcatggcacagaccaattttagtctttttagaaattaatattacttactacatttaatttaagcatgtagttctctttggtagcatataaaggtgtctcatatttatttttcccacaaaagcatttgtaggctgggtgcagtgtctcacacctgtaatcccagcactttgggaggccaaggcaagaggatcacttgaaccagcagtttgagacaaagctgggcaagatagcaagatcccaaatctattttaaaaatttaaaaattagccaggcatgtttttgtgagcctgtagtcccagctacttcaggaagctgaggcaggaggatctcttgagcccaggagttcaaagatgcatgagctgcgatcgtgccactgcattccagcctgagtgagagagcaacaccgtatctctaataaattaattagatgaaatgaaattaagcattgtaaagtcttaagctaccactttgcaagttttttggtttgttttgtttttgttttttgtttttgagacagagtcttgctctgtcgcccaggctggagtacagtggtgcaatcttggctcactgaaacctccgcttcctgggttcaagcgattctcctgcctcagcctcccaagtagctgggactagaggcacacgccaccacacctggctactttttgtgtttttagtagagatggggtttcaccatgttggtcaggctggtcttgaactcctgacctcgtgatccgcccacctcagcctcccgaagtgctgggattacaggcatgagccaccatgcccgacctgcaagtttttaatgagaaaagagaactgggtaactgatgtattatttctggagtattttctttgctatatatgttttatataggtctggatgttttatgagtatrtaagtgttttgtaaatgtttcttcatttaaacagtttcatgtacatttcttcatttaaatattactcgttaatttttttttttttttttttttttttttgagacggagttttgctctgtcacccaggctggagtgcagtggcatgatctcggctcactgcaacctccgcctcctgggttcaagcaattctcctgcctcagcctcccgagtagctgggattacaggcatgtgccaccacacctggctaattttgtatttttagtagagatgggatttccccatgttggtcaggctggtctcgaactcccaacctcaggtgatccacccacctcggccttccaaagttctgggattgyaggcatgagccactgcgcctggccacttgttaatgtttatgaagtaactcrtgcatatagtttaaagttgtatttctcaactatttctgtgcatcagaaactttcagagcccttttcgaaccacttgtagctgggtcccatccacctcctgtgattctgatcacttcacctggggtgggtctcagctacagtatttatgaagactagctgtattgtgctgtcctggtgagagaactactcactcagaaatccctccagatttgctactaaaaacagcagtctcccactttttgttgcaacccctatttgcctcttcccagaggccgctcttcaaatagtttttggctattttgttttttaaccaccatttttcttttttcttttttccttccttctctcccctaaccactatttttctaaataatatactggcattgataattcttgattcttcagttttagcgttatgtattaatttcccactatgaaagagaaatttatctccctttcctctttctgtccccaactcacatttctaccctttccatcattttatccacaccatagataattttgatagataatttgttttgttttgttttgttttagagggaggctcgctgtgtcacccaggctagagtgcaatggtgcgatcttggctcactgcaacttccgcctcctgggttcaagcgattctcctgcctcagcctctctagtagctgggattataagcacgtgccaccacacctggctgatttttgtgtttttagtagagacggggtttcaccatgttgcccagactggtcttgaactcctgacttgaggtgatccgcctacctcggcctcccagagtgctagaattacaggcgtgaaccaccgctcccagcctagcttccagtatttctttttttttcttttttgagacagagtttcactcttgttgcccaggctggagtgcaatggcgtgatctyggctcactgtaacctctgctccccaagttcaggccattctcctgccttagcctcctgagtagctcggattacaggtgcacgccaccacacctggctaattttgtatttttagtagaaacagggtttctccatgttggtcaggctggtctcgaactcctgagctcagatgattcacccaccttggcctcccaacgtgctgggattacaggcgtgagccatcgtgcctggccttttttgtgtgtgtgtgagatgcagtctgtcagccagactggagtgcagtgatgtaatctcagctcactgcagcctctgctccccaagttcaggccattctcctgccttagcctgctgagtagcttggattacaggcacgcgccaccatacctggctaattttgtatttttagtagaaacggggtttctccatgttggtctggctggtctcaaactcctgacctcagatgatttacccaccttggccttccaaagtgctggaattacaggcatgagccatcgtgcctggacttttttatttttatttttttgagatgcagtctcactcttgtcacccaggctggagtgcagtgatgtgatatcggctcactgcaacctccgcctcccaggttcaagtgattctcctctctcaacgtcctgagtagctgggattacaggcgcacaccaccacgcctggctaattttttgtatttttagtagaggtggggtttcaccatgttggccaggttggtcttgaatgcctgtctgggcctcccaaagtgctagggttacagacgtgagccaccatgctcagcctgagccacggcgccgagcccaatatttcttaagaagcatgaagcattctaattctgttttcttttttatgcaacacattttcagtgtctggaaacgtatagaatcttctctttcttcttagtgatttttcagtttctcaatatcgtttcctggtttgactttacttttttattttttaagatggagtttcactcttgccaaccaggctggagtgcagtggcacgatcttggctctctgcaacatccaccacccaggttcaggagattctcctgcctcagcctcccgagtagctgggattacaggcatgcgctaccacacccagctaattttgtatttttttagtagagatggggtttcaccatcttggccaggctgttctcgaactcctgacctcgtgatccacccgcctcagcctcccaaagttctgggattacaggcgtgagccactgtgcctggctggtctggatttacttttaactatggtgcttaacatgtacttggtgaattatttcagtctggaaactgctcattttctagagttagtccatttatttttctctctgcattttcttttttcctgttctgtcttttaagaacttttttcgttattgcacattctggtctggttgtcttttatttgtttgtctgtcctttgctctttaatacattttttctttaggaaatcccctcatctttatcttctaagccttttattgagatttttcatttgtctattttcctttcatatatatagaaatagatgcatgtgtgtttatgtaacacatacatacatatgcacatatatatataattattttgggtttttttaaatcatggttgaaatatatcactttcctttgagaatatcagtgatcatttaaaatttctccctgcctcgtatctgcttcctctttcttcatttgtttctgcttgtttttgcctctgtctttctcattagagacttccctgagagtatcataatccctgcttgtttgctcatacttaagattggagcctagcaaactgatcagaagctctgaggggtgattccaactgagctctgggactggttccaactgagctggaccttatagttgggtaatccctaatgccagtatctttaggtcttccttcatggcctggtcatgtatatcagagaagatgcaactattccacctggaatatmaaggtctagtgaccagcatgatgccatgttttccctgaagcgtgtgtgtatgtgtgtgcatgtgtgtaggtgttgtgtgtgtgtgtgtgtgtgtttatagatacatatatccttacccagtgcctcacacttaaaagagtgtttgtttgtttgtttgtttgttttttgagaagaagtctcgctctgttacccaggctctagtgcagtggcatgatcttggctcactacaacctctgcctcccgggttcaagcgattctcctgccttagcctcccaagtagctgggactacaggtgtgtgccaccacacccggctaatttttgtattttttagtagagacagggtttccccatgttggccaggctggtctcaaattcccgacctcaagtgatccactcagctcggcctcccaaagtgttgggattacaggtgtgagccaccatgcccggccaaaagagtcttaatcagtgcatgttgaatgatgaaatgagggagctattgtccttattttgtacttgaggaaactttgcctctgaggttcaggatcttgtctaatatttccaacaccagtctttctcattgcagtgcccatgctctttcccacgtagggaaagagtagcttttcaggcttgtctgagcctcatattagaggaatactgtgattgaaataccaatatttgtgtaacaagtatggcccatattttggctcttagattgccagtaggggcaaactaagcaagttgattggccttgtctgtggtaatgtagtatttagtaggagtttaaaataataataataaaaaaaagccatccaggtgcagtggcttacacttgtaatcccagcactttgggaggccgaggcaggcggatcacaaggtcaggagtttgaaaccagcctgaccaacatggtgaaaccccatctctactaaaaatacaaaaattagctaggcatggtggcacatgcctgtaatcccagctattcaggaggccgaggcaggagaatctcttgaacctgggaggcagtgagccgagatcgcaccactgcactccagcctgggcgacagagcgagactccatctcaaaaaaaaggccctcagtcattttgggcaatacttctttttcttttttcccctggaagaagaaaatccttttgcacatttaagtatttatgacagagctagctggatccctgcctgtgaaaatgacttacagatttgtcaaaacaggagtatttatctaaacagcctcatcctaaagtatttgactgatgtctacagcaatcagtttcttaaggcattcacaacaggattcagttatgtaagagctcttctgccagtcagcctcaccytcattccatttctctcttgctgctttgaaagacctttttgtttttgctgtcctgcagttatatggtgatatatctaggtttggcttaaatctattgggatttgttggacttcctgaggtggtaggttggagttttttgttactgctgggaaattctcattttctcttcacatatcgatggtatctaagcttctctctcctcaccttatggagctccaattaaatatgtgtattagacattcacactgtgtcctccacatttcttaacctctcttctgtctgtattttccatcattttgtttctttggttgagatttgtatagtttcttctgatctagctcttagttcaaaaattttctcttcagctgtgtgtaacttgctctcaaacccatctattgagttttttgttggttatggtatttttcatgttgataaattatatgtcattcttttttaagtattccattgcccttttctattttattttatttttgagacggagtctcgatctgttgcccaggctggagtgcagtggcgtgatctcggctcactgcaatctccgcctcccgggttcaaacgattctcctgcttcagcctcccaagtagctgggactgcaggtgcccgccaccacacccagctaattttttgtatttttagtagagatggggtttcaccatgttagccaggatggtctctatctcctgacgtcgtgatctgcctgccttggcctcccaaagtactgggattacaggcatgagccaccgcgcccggacactccattgccctttttatagtttcttattttcaagtttatttcttatttcttcaaacttaataagcatacttattatttgttgtctgtgtgatattttctataatcatatatgaaattggaatttcttttttttttttttttattgagacagagtttcactcttgttgcccaggctggagtgcaatggtgcgatctcacctcactgcaacctccgcctccccggttcaagcaattctcctcagcctcccaagtagctaggattacaggcatgtgccaccacgcctggctaattttgtatttttagtagagacggggtttctccatgttggtcagggtggcctcaaactcccaacctcaggtgatctgcccgcctctgcctcccaaagttctgggattacaggtgtgagccaccgtgcccagctgaaattggattttctatatgaaatctgattttgctgtttgagacatcctttgctgtttttgtgcccctgtatgcttgattatttttgactatgtttcttcttcttcttcttaaaaattacttgtatgaagttcatagagccctaggatgaggatacctttattcagagagggtctgcatttgcttatgccagacacccagaggcactaccagtttgggatcacctagttgatagaaatctgggctgcaaatatgcaggagggctgacttacactgacaaccctcaggaactaatttttgttttcttttgttttctgctcagcatcaagaaaaaatgttttgcagtcccatgtggagtgatcatggaagggagaggaagtgtcaagtttggttttggttaatccttatactgacagtatagccctttaggattccaggttaaagggtgtacccttttaggattccaatttaaaggctgtagccctgaggattccagtttaatgcagggcgagttttctattagattcccatcttggacagatgctgagctgtgacatttgtccccttttccagatgagatcttcaaaacccaaattcaagttgctagattgattcagggcaagagttctggaatctgcatatcctttcagtctcctctacagatttttctgtatctctctgcccttttatcagtgaagtgcccttgagttcagtccttgttcttttccacctacagctgacttcctgatgttcttagctgattttatggctttgctgtttctgtgttgacaacctccaagccagacctctctctcaaactcaacttgaatattatctacctactccatatctttagttataatttagttggtagagtttgcaaactgaacatgcccaaggcggaattcctaggctcttccatatacagctttccccattttagttcatggctactatgctattatagttgccccggccataatccttgatttcgtacttgactactcctcccctcacatccaacatccattttaggaaatcctgttgactcgaactaatatgtatatccaagatcctattacctcctctgcctcatcctggctcataccaccatcatcattcacctgaattactgcagtagccttctaatgagtcttcctccttcctcgctctcctgtaagtgtgcctataagacagatatgccacctttctactcaraatcaccaatggcctgtcatctcactcagaagaaaggctttattttttctgcttacatatacccctccctccccagtcttccaaaaacatctctgatcttctctcttccctggcccctgattgctcagttctcttcagccacactgacccccttgctgttcctgaaacatatcaggcagtcatctgccctagatctttacattcttttccctctgccttgaatgctcttccaaagatacctacattattctttaggtgtttgagcaaataaagccttttaaaaggtcttccctaattgtcctacttaaaattatatgcctccccagtactcctcatccacctttctttttcttaataatcataacagttaacttttctgtagtgactagcaatatgcactgttctaagcattttatgtgtatacgtttaattcctgcacaacacagtgtgttgcttttattgttcccattttactgataagaaaaccaaggcacagataaaggttaagtaatttgcccaagatcacacagatagtaggtagccaagttggaatgtaaaacaatggactgtaaaacctgtgctattaactatgtgctgtgcttccatatgtagcacttgtcaccttctgtgatattatataacttatttatttagttggttagtttactgtgggtcacaatctaccatttctccatcccccatccaactcagctctaggccgggcacggtggctcacgcctgtaatcccagcactttgggaggctgaggcgggtggattgcctgaggtcaggagttcgagaccagccttgccaacatggtgaaaccctgtctctactaaaaatacaaaaattagccgggtgtggtggcacatgcctgtaatcccagctagtagggaggctgaggcagggagagttgcttgaacccgggaggtggtggttgcagtgagctgagatcgccactgcactccagcctgggcaacagagtgagacatcatctcaaaaaataaaaataaaaataaaaaaatacttacataaatgtcagctccagaagatagagttttttctgttttgtttactgttgtatctctagcacctgtagcagtgtctagtccttaggtccatgagttatttgttgaagaagagaagaagagatctttaaaaagaacattatatactgttttaagtgaatgcttttttttttttttttaagagacaggttttcattctgtcacccaggctggagtgcatggagtgcagtggtacagtcatagctcactgcagcctcatactcctgggctcaagagatcctcctatgtcagcctcccgagtactaggactacagaaacatgccaccacacctggctaatttttaaattttgtgtagagatagggtcttgctatgttctccaggctgatcttgagctccctgctgtaagcgattctcccaccttggtcttccaaagtgctgggattatgagccaccacacccagctagtgaatatattttaaaccccagttaaagaaataatttcctaggcaaaagattgaatggctatatgaaagaaatcagaacagccccatcactggctagaaatgtaggaaagttatcaaaattatttccttttccccmcaagaaaggcttctagcccttctgggtttaccaataatttttttttttttttttttttttgagacagagtcgcactctgttgcccaggctgggatgcagtgacatgttctcagctcactgcaacctctgcctcccgggttcaagtgagtctcctgcctcagcctcccaaataactgggattacaggtgcatgttaccatacccggctaatttttttatttttttatttttagtagagatggggtttcaccatgttggccaggctggtgtcgaactcctgacctcagatgaaccacccccctcggcctcccaaaatgctgcgattacagacgtgagccaccgtgcccggcccaataatactttgaaacctttagagtcagatatacaatttagggcaatgaaaaaggtcagaactatccaattcattctgtagcagttaggccacaaaatacttgtatggctttgatcatgtctttgatcttttctgagctgctttttccttctcaaataagttgtgaatgctgatctcacaggattgtcgtgattgcagattaagatctatgaagcctagcgtagtttctggaaaatagcactcagtaaatgataggaattattatgataatgatactgtttccagacaaaattagcacacatgaaagaaaactttaccccaaagtagtttatcaatatagaatagaagaatttaaataaaatactagccaataggctattaatagaatcatctatcaaaagagtttatctgaatcatgcatgaagattaggtaaaggaaaatcaggccaggtgcagtatctcacgtctgtaatcccagcactttgggagcataaggcacgaggattgctagaggccaagagttcaagactagcctgagcaatatagcaagaccccatctataaaataaaaaactagctgagtgtggtgccacgtctgtgcagtgctagctacttaggaggctggggcaggaggattgcttgagttcagaagataaagactgcggtgagctatgatcacaccactgtactcctgcctgggttacagagcaagaccttgactaaaaaaaaaaaaaatttaatactataaactatgtcgataggataaataagacaatcacatgctttcgtaacagtcatttagtaaaatctaataacactcatcacgtgttcttaactaaagcactgaacctatgatgaagagcttctttattaaatagccaacgttgtacttagagaaacactaaaagtatgttcaattaaaataagaaaaagagaatgcctgttactatcattatgatacactattacttttgtcccaactagaaattcataacattccccaaataaaacaataacaagagttgttcggattagtagaagaggacacaaaacagtaaatattggaaagaatgagatgaaaaccactagttgcagacggtatgattttatatttggaaaatcaagagaatcacagaaaagctactaatatgaatataaattcatcaaagtggttagatataggacaaacatacaaaattcaatagcaactttatatatgagctatgtctggttcaaatttattcatttgtatatatttgctataatttttcttaaacttaatagctttgaatcgtacacttcatctgtgtgggcagttatgatatattctgcaaaaacttgcaaataaagattataagattatcctatgggagttaaactataaaattaattaatgaatagatcagaacagagtaaagccacatgtaaagcaccttaaagaaactatttctcaggcctaaaatttaattataatctgatagaaggtattcatgtatttatgtcagaggtctccaagatgattcccaggttcagtgatttcctaggaagattcacaggactcggcatatagtcgtactcactgctaagatttagtacagtaaaaggatacagagcaaaaccagcaaaagaaaaagataagtggggtgagtttggagaaaaccaagtacaaacttccaggggccctcttccagcggagtcacacaggatacacttaattacccaaccaacaagttgtgacaacatggattaaatattatctaccagcaaagctcattaggaactcagcaaccagggtttttattgggaactggtcttgtgggcactctctgcctggctcttaacaaaatgctacactcccagaaggaaagcaggtgttcagtataaaccatcttgtttgcacattctagggacagcgagccactctttatcagttctgctaatggtaggaattttcaccaaaactaagttcccagaagccagccaggggccaacccaataagcaaaactttcgaaggatggcagtctggcttgctatgctaactcttctctgcacagtattattgggggaaaaaaaaaaaagtcaggagagaagttcgttagcaaggagtgcaaagaaaaaggagacctttagaaataaataatagcaatgtccattttagcactatctaagaggaaaagcgacatggctaagatccctaaagccatctttagggatctgtagtgcagaaaatgcctcaatctgccttatcaaaagaatcattcaatttactccctgtgtttggattacaaaatatttctaatatatctgaattacttgcttaattttttttttttttttttgagacggagtcttgctctgtcacccaggctggagtgcagtggtccgatctcagctcactgcaacctctgcctcccaggttcatgccattctcctgcctcagcctcccgagtagctgggactacaggcacctgccaccatgcccggctaatttttttgtgtttttagtagagatggggtttcaccgtgttagccaggatggtctcgatcacccgacctcgtgatccgcccgcctgggcctcccagagtgctgggattacaggcgtgagccaccgcgcccagcctatttgcttaatatttttagtactggtattacattcacaaagtcacagaatcaaaaatttcaagaagtcatattgtgaaatctcttcctcccgcctagtcccaatgcactaaattcctatctctccctatagataatcactgttacctgtttcttatccttttagaaaaaaagttgtaaatggatatacaaactaaaacaaatagtcttttttttatttttattttttgagatggagtcttcatctgttgcccaggctagggtacagtgacatgatcttggctcactgcaacctccgcctcctgggttctagcaattctcctgcctcagcctacctagtagctgggattacaagcacacgccaccatgcccggctaatttttgtatttttagtagagatgggctttcaccatgttggtcaggtcggtctcaaattcctgactcaaatgatctgcctgcccttggcctctcaaagtgctgggattacaggcatgagacacaccatgcccagccaagaaatagtctttagttttcttagttatataaatagtagtaacatcttgtaccacattgcaccatatcttttttcatttaataagaagtattgaggctgggcatggtggctcacacttgtaatcccagcactttgggaggctgaggcaggcagatcacttgaggtcaggagttcaagaccagcctggtcaacatggcgaaaccccgtctctactaaaaacacaaaaattagccaggcacagtggcattcccctgtaatcccagctactcaggaggctgaggcacaagaatcacttgaacctgggcagcggaggttacagtgagctgagaggtggaggttgcactccagcctgggcgacagagcgaaactgtttcaaaaaaaaaagaaaaaaagtattggtgacccttcatacctgttcataaagaacttctttgttcttttttatagctgtttattattccattgtattattgtagcataatttattgtaccaatcctgtatttctggtcatttggttgtgttatttccattccttcactatcactaacaaggcttcaaggaataatttaatacttacgttattttattagttgcatagtgtatctatagggaaaatttctagtttgggaatttctgtgttaatatgcatttgagtgtaatagatgctgccaagttaaattgtcttctaaagtgtttatatcaatttatactcctattacctacatatgartatttccccacattcttgccaamagtgtatattctcaaacttttagaaattttgcttaactgatagggtaaaaatggaattttgagatggagtctcgctctgtcatccaggctggagtgcagtggtgcgatcttggctccctgcagcctccgcttcccgggttcaagtgactctcctgcctcagcttcctgagtagctggaattacaggcatgcgctaccacgcccagctaatttttgtatttttagtggaaacggggtttcattatgttggccaggctggtctccactcctgacctcaggtgatctgcccacctctgcctcccaaagtgctgggattacaggtgtgagccaacgcgcctggctragaggctctttcaatattatgagattaatcctttgtaatgtgagttccagatattttcttcagttcattatttgacttttgattttgtttatgctatattttaccattcataagcttttgatttttatgtaactaggtttatcaatcatagttaatcataacaggagagtctaggtaaaaaaaataattatttttttcaccacttttattatttaattttttacatttacatctttgatatatttggaatttgtcctagtgtgtggtatgaagtatggaaccaactttcttttagatggctattcagtttttccagccaatctgaggtgtcattattatgtgtacataagtcctaaatgttttggagtctaattctggacttttcattctgttccattggtttcctgcctactcttgtaccagcaccactttaattactgacgtttttcttytgttatgttttgttttgttttgttttttgttttgagacagggtctcgctctgttgcgcagggtggagtgcagtggcacaatcagagctcattgtagccttgacctccctggtgcaagtgatcctaccacctcagcctcccaagcagctgggactgcaagcatgtaccaccacatttggctaatttttctattctttgtagagtcggggtctcactattttgcccaggctggtctcaaactcctgggctcaggtgattctcccacctcccaaagagctgggattacagtcgtgagccactgtgccgggsctcactgaggtgtaaagtatgtttcaatatctgatgagtctagttccccctctgctctttttcagagttctcttggggaatccagtttttccatatgaactttagaattacttttttcaattgtaggaaaaaaagtctgtggttatttttattgaggttggtttaaattttaataagttagtgtaatgacattttagaattgttttatctctaagaacatagtatgttttggctgggcgtgctggctcatgcctgtaatcccagcattttgggaggccgaggtgggtggatcgcttgagctcatgaatttaagaccagcctgggcaacatggcaaaatcccatctctactaaaaatataaaaattagccaggtgtggtggcatgcacctgtagtcctagctactggggaggctgaggcaggagaatcgcttgaaccagggagacggaggtttcagtgaaccgagatcgtgccattgcactccagcctgggcaacaagagcacgactcaaaaaaaaaaagaacatggtatgtctttacatttgttcaagtcttcattcaagagtattttaaaaaatgtttttgttgtttgattttttatttctttttaagtttactcctaggagttttatttttcttgttgctttaccacacagcttatgattttacttcccttgtagatataccttcagggaaaggatatgattaattatgtagagtactttagtttgagtgtcagcttgttactgtaaatcacagattcacattctggtcttttatgtcattccatgagagcagttattatgacccacaataagagatgactccaggaatcaggttttggagctgaaagccagatcctggatcttggaaagttcacctttatatatataagtgtgtgttgctcgatggattggcctcttggtatacagccagatgacttctccgtgcaaaactacaatcatgtttatgccttgtgtttaaaaaatcagtagttcactcagtaaactatttcaattgagagcctttaagaaagcctattatgcatggtacttatatatgaatggcagtctccttagctgttgctgatgtttctgcatctatttatgagtttaagggcccaatctatacactaaaaatatgctttggaaaattactaagtaactatctttggtcaaatctttaatgcaagttttaaattcttatatattacagaatttcacaaacttgtttggacagccactagtctgcttgctttctcctacagcatatccaaaagctttacaaggtatgtaccctcattgcctggtatagccataggttgcaaataaacactatctatattatgaatagtactgatctttgttttttcctcccataatgatcgcgtgtggatttatggtgtttaatatggcaggtgtcgctctgaaatatacccagaagccttgccaacaaccaggatcccttaatgtgctaccgttaggccttgaaataattcatccctgagaaagaagtggttttgttccttgctgatggggaactcatgatttgtaaattttaaaatttgttttataggtgtttgttttgatttgctggtcatatccatatagcatggttttcctatacctttgcaggcatgttttaaaagatccaaggcatcttttaagactttaagattgctggtctaggaaacttctcagtctatgccacagagttaggataacctaactggcacaacttaaagtgtttcttttattcacatttttaccttgttgtgatttaaaaataaaagaacctcttctaagtctgccagagagacaggttagtgttttggccatttcttcaatggctgagaatcaaaagactttttgtccttaataatttgtctttaattagtgacacataaaatctaattctaactcccagtcatttagtaggtaaaatactaaacaaccttaacactgttttagcagtacttgtcactgtttcactatctccctaactgtgaatagtgctgatgtctctctgtgggagatggcattttactgctacttcccagccagaagtcctgtctgctgacatagtttgacacaggaagtgatggtcagcatttgaatgcctgagagaagctggaggctttcaccgttgttttaaggtaagttctgctgtttaacagggaaaaacatgtagaaatattaacttcatgtatccaaaagtaaaattactaagggatagaacttaccttcaaacaacggtaaaattctcctgctttgaagattttgttatcctgtttcttatcatttctggaggaatgtaatctctttcagttactgagcagtactttttgctatcaatctgtcctatcattatgtagttttatttaaatttacatggtcaaataggttaataccaagattattcggtctgaaagacttcattgtatagaggagaaaaacagactttggaggcaaactgactgaatttgaatcccgactcagccacttacttgctgtgtgaccttgggaaattattcagccattctgtgcctcagtttcttcatctatcaaatggaaataataatagtatctacctcatagaataatgctgggtatgtagtaactactcaatatgtgctgtcattattattattatgcttagttgtaatacatgtccttcacacattttatccggtttcctatcttcatgctacaaagcttagacctctaacaccttaaattaattgttcarttacaaaagcagattcaaaattcttctgtgagaaatgttttggatttatccataggcataattgctactcacctctgcaaaaggggagagccttccatgtgggtgcaaaactagctgatcagtaagcacttctgagatctaaagcctatagttttctcattagccaagagttacttcatttattcaatttttttttttttttttttgagatggggtctcactctgtcactcaggctggagtacagttgtgtgatcatagctcacttcagcctctacctcctgggctcaggtgatcctcccacttcagcctctcaagtagctgggaccacaggtatacactaccacacccagctaatttttgtattttttttttgtagggactgggtctcaccatgttgcctaggctggtctcaaactcctgggctcaagagatctgcctgccttggcctcccaaagtgctattcaacatttattatcaggtactgtgctgggcactggagatagcactatgacctgacaagcacagttacattcttcacagagccaaatgtcttgtggcagatagacagagcctgatgggcggttattataagtgattcacaagaggatgcctgcaaatggacgaggaactcctgactagcagcacaatgaagacgagggaaggggatgagataatgtctaacgtggacgttaagaacatggagaactagatgggggtgggaaatgaccgagcaagagtgttccagctgagaatttgcatgtgctgtggccatgagataagacagcttagggagcatgtagagaaatttattttattgtatttttttgagatggagtcttgcactgtcgcccaggctagatgcagtggcgcagtctcagctcactacaacctctgcctcccaagttcaagcgattctccttgcctcagcgtcccgagaagctgggattacaggcgctcgccaccactcccagctaatttttttgtatttttatgagagactaaaaatgttggccaggctggtctcaaactcctgacctcgtgatctgcccgcctccgcctccaaaagtgctgggattacaggcgtgagccaccgtgcctggcctaattttgtattttcactagagacagggttttgccatgttggccaggctggccttgaacacttgacctcaagtgatccacccaccttggcctcccaaagtgctgggattacaggcgtgagccaccacacctggccaagcacatagagaaattagtcattccttctagctaaagggtagagtttgagattgtgtgattgaattgtgaaagaatttctaagatttgttaagtaatttaagtggaagacaatggggtacaggttgagcattcttagtcctaaaatctgaaatgctccaaaattcaaaagtttgagtatcaacacgatactgaaagtgaaaaattccacatatcagtacttagcacaaggtttgtttcatgtacaaaattatttaaaatattatgtaaagttacctttaggttatgtgtatacggtacatatgaaacattaataaacttcgtgtttagacttgggacctgtcccsaggacatctcattatgtatatgcaaatattgcaaatcccaaaaaacccaaaatccaaacacttgtggccccaagcattttggataagggatactcaacttgtaccatcaaaagatttaaacaggagagtagcatgaaagagcattcagttaatgtcctagagaatgaacttgggaggggcatggatgaaaatagggagatggctggagatagcacaatgactagtagccagctgcaaagatactaagcccatagaaccatagaaccaacaggactttgtgatggactaggtgtggggagggaaggcaggaatagacttccaggtttctggctgagatgctggtagaaatgataatacctgatgagaagcatatttgtagagaacaaaaggggaaataatttgctttgagttgttgacatgttgagtttgaggtgcctttgagaattaggttgaatagagtagcctagagcagcagtacttaaaagaagtaagagtgtgagtcattaaattttctattacctatatcaaaaacagtaaaaagaaacaggtgaaattagtgttaacaatgacattttgtactaaagctttgaaatcatctagtcacattttactcatctagtcacatttttagtgtccagtattttactcatctagtcacgtttttagtgtccagtatctaccgcaagacagagcagtgccagacctaaggaattcaatttaggctgctgatagagaattagaaatttgtaggcatataaatggtaactaaaatcatgggagtgagagcagtcagcaatgtatggggccaaagaaagaaactactcatatttaagagataggaagggaaagagcagctcatagagagcaactcagaagagaatgaaaaagactggcgtttgtagcactcatcagagaattctatcaagataacccataatccaacacttgccatatttggatgaaatttgttaattgagagcaaaaaatagtaagaaatatcattttccatttctcttaagttttctaggctctttctgaagtttgttcagcagaaagcaacatagcaaagtttttgtagtttcgtgaagaatctgctttgatgaattatgatttaatgagatagctttaattttatatattatcagtatattaaaatgttcctcatatgtatctcttatcttttgcaaaactattgtctatatatataacatgtttgttattacagatcaatctcagcgaggtagcctcttcactctctttttgaacaatcctctaatggccttcctatttgtctctggattgtcaagcatgcgcagaggcctatgggaaaagtgtcaagaatatcttcgaaaaatcaaccgtgatattgcccagctactgactcattcacgttcaataggtaccctcctaatctaactgcacrtttaacagaatgtactataatggcttaaaatggttacttattttaaattgtttgaatttttaaaggtatgtgtcccaggcaggaaagttgagaacgctttcctgaagtttccttcccctttgaaacataatttccatttaagcatctttttactgtcacttttctcctctttgcagatcaggcatttctccagttttttggagatgaatttcttcgcttgctcctcacaagatttatcttttgttcagccaccatgaggatgcacaagatttttcgggtaggcaaagaacattattaaagacgaattttatcattttaggtatttaagaaccatgtattatattttacctgtataaaataaggttataataaaataatattattttggataaattcaaaataatatttacaaatgtaccgtcacactggtctgctaagtaaaaaaatacatttgaatacgtaaagtataaagattaacaatattaaggcacatttgagtacctatcgtttgtttaaaagtagaacattttctggctggccgtggtggctcccgcctgtaatctcagcactttgggaggtcgaagctggtggaacacttgaggtcatgagttggagaccagcctggccaacatgctgaaactccttctctactaaaaataaaaaaattagccaggtatggtggcacgcgcctgtaatcccagctactctggaggctgaggcaggagaattgcttgaacccaggaggcggaggttgtggtgagcagagattgcatcactgcactccagcctggacgacaagaacgaaactccaactcaaaaaattaaaaaaaataaaagtagaacattttcaatacatccctgatcctatctccctctcaaatgaaacttacatcctgaattttatttatttatttatttatttagagatggagtttcactcatgttgcccaggctggagtgcaatgactcgatctcagctcactgcaacctctgcctcctgggttcaagtgattctcctggctcagactcccaagtagtagctgggattataggcgcccaccaccacacctggctaattttttgtatttttagtagatacagggtttcaccatattggccaggctggtctcgatctcctgacctcaggtgatccacccgccttggccttccaaagcgctgggattattggcatgagccactgcacccggccctgaaattttttttttaatcattcatttttctttgtagttttgcagcatgtatttctattcctacacaacatatttatgaatccatattgtatgtattctgcagcttccttttttccagttattcctgagattgagccatgttgattgactatagctttcactcattcattttgtttgactgtgcaacactaggcagtgtttgactatatattgcaaatcacttattcttctgataatggacatttgggttgcttccaagtttttattattatataaatgatactggccaggcgcagtggctcacacctgtaatcccagcactttgggaggcagaggcaggcagatcacaagctcaggagttcaagaccaggctggccaacatgatgaaatcctgtctctactaaaaatacaaaaattagccagacatggtggcatgcacctgtaatcccagctactcgggaggctgaggaaggagaattgcctgaacccaggaggcggaggttgcagtgagcagagatcatgccgctgcactccagcctgkgcaacagagcaatactcagtcttggaaaaaaaaaaatgatgttactgtgaaattcttgtatcagtttcctggtacacatatgtaagattttctctgaggaatatacctaatagtagaattgcaagatcagaggatataagcatatttaattttactaggtaatgccagactgtgttccaaagcggttgtatcagtttacacttataccagcaggatataagagttgctatttctgtaatccttcctttccaacacttgttgcaatcatactttatagcttttgtgaatctgctgaatgtaaagtggtaggacattgtggttttaatttttatttcgaggattactgttaaggttgagcaacttctcatatgtgttctgtttttctctttgtaaagaatgtgttcaagtcttttgcttgacttgatagtccagttttctagctgttgcttttttgtgtatggatgtacctatacaacacttcattgaggttttaaatattttagccattatatttttcacttctgtaaggaaaatttttttttcaaatatgcctgaacagttaaaaaaatattttgcagcttttggtttcagaatattatttctttctgttttattatgataattttgaaatgtaaaagaactgtgcaatgggccaggcgcagtggctcacacctgtaatctcagcactttgggaggccgagacaggagcatcacttcaggctaggaatttgagaccagcctgggtaacatagtgagacctcatttctacaaagaaatttttaaaattagccaggagtagtgatgtgtgcctatagtcccagctcttcaggaggctaaggtgggagaattgcttgagcccaggggtttgaggctgcagtgagctctgattgtaccactgcatgggccaactgtgcagttccacttaagacacagcctttttttttttttttccaaaaaataaattggaaaaattttggagatttcctacagtttggaaaacagatgaactacatagcctaggaatattgaaaacattgctcacctgggccctgcggccagcagaattggccccgctctatggctgctggggcctgcgcactggaatcgccgtggcctgcgcaccccaccatgccagtttgaacctccatggcctcaaccagattcggaatgtcaaaaagcagagtgtctatttgatgaatttgaggaaatcgggaactttgggccacccaggctctgtagatgagaccacctatgaaagactagcggaggaatcactggactctttagcagagttttttgaagaccttgcagacaagccatacacgtttgagkactatgatgtttcctttgggagtgktgtcttaactggtaaactgggtagagatctagcaacctacgtgatcaacaagcagacaccaaacaagcaaatctggttatcttctccatccagtggactcaagcgttatgactggactgagaaaaactgggtgtactcccacgattgcgtgtccctccatgatgtgctcgctgcagagctcactaaagccttaaaaaccaaactggrcttgtcttccttggcctattctggagaagacgcttgatgcccagcccggttttaaggatattaaaagctgtcaggccaagaccccagcttcattatgcagctgaggtctgtttttttgtttttcgttttttgtttttcattcctgcttttgaggaacagctctgtggaaagaacgtgttgcctcctaccttgcccacaagttttgatttttaatttctacagaagatttttttggattaattgtctgatttcctccctcatatgatatcctttatcttttataatgtcttatccctatacctgaatataacaacctttaaaaaagcaaaagaataagaaggaaaaattccagcaggagaaatgaattgtcttcactcttcattctttgaaggacttactgcaagaagtacatgaagagcaactggttaacctgctcactgttctgtctcaaaatgagacacattaacgggtaggctacaatgttcctggrcttctttcaaagtggaagcacttctgagctctttagcattgaagtgtcaaaagcaattcacatgggaagacaatttcttatatgtgctttgtgactgccagggtgtggcctgcactgggttgtcctgggagacctagtgctgtttcttccacatattcacgtgtgtgtgtgtgtgtgtatttttttattattttttcattttaagggttagtatggaatcagctgctacaagaatgcaaaaaacttccaatgacaagaaaggaggaaaaaaaagccattttcatgagctgagtgatgtagcataataaacaaaatcatggagctgaggaggtgctttgtaaacgtgaaggggcataaaaaggaaagagatacttgtgtcaataaagagagcctggtcctagacgtagttcagccacaaagtagttgtgcctttgtggacaagtttcccaaactccctgagcctctgctttcccatctgttaaatgaggggatagaatatggttgatttccagcattcagtggtcctgtcaagcagcctaacaggctagctctaattcccattgggtagatgaggggatgacaaagaacaatttgtgagctatataggaaacattgttattggtgttgccctatcaggatttcagttgaattcatgttaaaattacagccgtcctttattgtacacttattgggttaagcctattataccatattacctcattttaatttttactgacctgcactttatacatgaagcaacaaggctccaggacattaaaactcacacaaagttatgctcatgttatattattttcttacttaaagaaggatttattagtgacaagtttgtattaatatgtagcaaaggcttttccaatgggtgaataaaaacacattccattatagtaaaaaaaaaaaaaaaaagtcaagctgggagaagtggcatatacctatagtcccagctactcaggaggctgaggcaggaggactgcttgaagccaggaattggagatcagcctgggcaacataggaagatcctatctcttagaaaaaaaaaactcttaataatgaaacagtataaacagaagctaagtaaaatattttctttctcctgaaataaaattattttttgagtctgatggaagtgtttaagtgcagtaggtcagtgccagtgagaaaaaaaataaaatcatacaaaaaaagaaatattgaataaattaagaaaaaggtatatcatraatacataaaatatatgtagacactagtctattttatcatttactactataagatatatacaaatctattatgaatgattaaaatttatgcacacacttacagaccatatatggtaccattcacagtccagagaagtgtaaacaaaagtaatgatgcaatattaaatcataactgtccttgtgatagtttgctgagaatgatggtttccagcttcatccatgtccctacaaaggacatgaactcatcattttttatggaaggacaaaaaaccaaacaccgcatgttctcactcataggtgggaattgaacaatgagagcacatggacacaggaaggggaacatcacacaccggggcctgttgtggggtcgggggaggggggagggatagcattaggagatatacctaatgtaaatgacaagttaatgggtgcagcacaccaacatggcacatgtatacatatgtaacaaacctgcacgtgtgcacatgtaccctagaacttaaagtataattttaaaaaatcataactgcataaaatcactgtagtgcctactgtactactgtaataatttggtagccacatcctgttgctctggcagtaagctcaagtgttgcaagtactgcttagaatgcctgtcatttccgtgagcagtttgtctctccagtaaattgtgtattgtaataaaaaatgatctctagyggttctcacatattttttattgtgtttagtgcagtactgtagtaaaccttgcataacaccatgggatccatatgaagtgatgcttcaagtgctcccaagaagcaatgaaaagtcatgacattacaagaaaaagttgaattgcttgatatgtaccatagatcaaggtttgccattgtggttgcctgccatttcaagataaattaatccagtaaggagtgttgtaaaaaaagaaaagaaaatttgtgaagccatcactgtagctacgttagcaggcatgaaaaccttacactttttgtgaaatacctttttatctcataatgaaaatgtagcgtttatgtaggtgcaaggttgctataagacatacttacaggccgggcacagtagctcacgcctgtaatcccagcactttgggaggccacagagggtggatcaccttaggtcaagatttcaagaccagcctgaccaatatggtgaaaccctcgtctctactaaaaatataaaaattagctgggcgtcgtggcgtgagcctgtagtctcagctactcgggaggctgagacaggagaactgcttgaaaccagaaggcggaggttgcagtgagctgagatcacaccactggactccagcctgggcgacagagcaagactccattcccccccgacatacacacaaaaaaaagacatatattatgatttgagaaaaagcaaactcattatataacaaagcaaaaggaaagtgaaggatctacagctagagaattaaattctggcaagaaagggtttgataattttcgaaagagctttggctttaaaaatgttaagataacacgagaagcagcttctgccaaccaagaggcagcagacaagttcccagaaagtaccttttctggaaaaaaaaaaaaaacctgccacaaaagacatttattagtaaggaagagaagtgaacaccaggatttaaacaggaagggatagacaactctgttattttgtgcaaatgcacttgggtttatgatcaggagagtctttatctataaagctgctaatgcaccttgacagaaaagataaacaccagctgccagtacaacaagaaggtctggacaacaggaactttcttccagattagtttcgttgatgctgtgtccttgaaatcaggaagtaccttgccagtaagggactaccttttaaagtttttttgatatttggcaatgccgtggctgtccagaaccccattaattctatactgaaggtatcaaagtggcctacttgccccagaacacaatgtcagcctctagatggggggtcctaaggacctttaaggttcattacacagagtatgtattatcaaaactatggaagagaacccccaatggagagaacatcatgaaagcctgaaaggattccaccattggaaatgccatcattattacagaaaaaggcttgaaagccatcaagcctggaatcattcctgctggagaaaactgtgtctagatgttgtgcatgacttcagaggatttgtgacaatcaaggaaatcatgaaagagattgtggatgtggcaaaaagggtggggagtgaagggtttcgagatacagatcttggagaaattcaagagctaatagacaccacaccagaagaattaacagaagatgacgtggggtggacatgaatgtttctgaaccagtgccaggaagcagacatagaagaagcagtggcagaaaacaaatggacattagacaacccagcagaagggtttagattattcaggattgggcttttgacttctatgagatggatgcttctatgataatggacactgaaatgaaagcaaatagtggaaggattggtgccatatagaaacattttagagaaatgaaaaagcagaaatgtcagacacaaattatgacatatttgcataaaattatacccagttgcctgtctctcctgcctccccttccatctccttcacctctcctctctctgccacccctgagacagcaagaccaacccctcctcctcctccacagcctactcaatgtgaaggcaatgaggatgaagacctttatgataatccacttccatttaatgaatagtaaatatatttctcttccttatgattttctttttcctttttttttttttttttttttttttgagacagattctcactctgttgcccaggttggaaggctggagcacagtggcgcgatctcagctcactgcaacctgcacctccggggttcaagagattattctgcctcagcatcctgagtagctgggattacaggcatgttccaccatgcccgcctaatttttgtatttttagtagaggtgggatttcgccatgttggccaacctggtctcgaactcctggcctcaagtgatcctcctgcctcagcctcctaaagtgctaggattacaggtgtgagccaccgtgctcagccctggccaattttcttagtaacattttcttttctcagcccggcgctgtggctcacgcctgtaatcccagcactttgggaggccaaggtgggcagatcatgaggtcaggagttcaagaccagcctggccaacatggtgaaaccccgtctctactaaaaatacaaaaattagccgagcatggtgtgagcacctgtaatcccagctgctcgggaggctgagacaggagaatcgcttgaacctgggaggcagaggttgcagtgagccaagattgcaccattgtactccagcctgggtaacaaaagcaaaactccgtctcgggggggaaaaaattcttttctctagctaactgtattgtaagaatacagtatataggctgggtgtggtggctcacgcctgtaatcccagcactatgggaggctgaggagggtacatcacctgaggtcaggagttcaagaccagcctggccaacatggtgaaaccccatctctactaaaaatacaaaaattagccatctgtggtggcatgcacctgtaatcccggctactcaggaggctgagacacgagaatcacttgaacctgggaggtggaggttgcagtgagccaagatcgcgcgactgcactccagcctgggtgacagagcaagactgtctcaaaaaaaaaaaagaaaaagaaagaaaaagaaaaaacaatatataatacatataatatacaaagtatttgttaattgactgtttatgttatctgtaaggtttctagttactggtaggctataagttgaattgcttgatatgtaccatagatcaaggtttgccattgtggttgcrtgccattttaagataattaatccagtaaggagtgttgtaaaaaaagaaaagaaaatctgtgaagccatcactgtagctacgttagcagccatgaaaaccttacactttttgtgaaatacctttttatctcataatgaaaatgtagcatttatgtaggtgcaaggttgctataagacatacttacagaccgggcacagtagctcacacctgtaatcccagcactttggcaggccacagcgggttggtcaccttaggtcaagaattcaagaccagcctgaccaatatggtgaaactctcgtctctactaaaaatacaaaaattagctgggcgtcgtggcgtgagcctgtagtctcagctactcgggaggctgagacaggagaactgcttgaacccagaaggtsgaggttgcagtgagctgagatcacaccactgcactccagcctgggcgacagagcaagactccatccccccccgcaaaaaaaaaaaaaaaaaaaagacatatattatgatttgagaaaaagcaaactcattatataacaaagcaaaaggaaagtgaaggatctacagctagagaattaaattctggcaaaaaaagggtttgataattttcaaaagagctttggctttaaaaatgttaacacgagaagcagcttctgccaaccaagaggcagcagacaagttcccaggtgccactgaggggaaaggatacctgcctgaacaggtttttagtgcagaagaaagtaccttttctggaaaaaaaaaaaaaaaaactgccacaaaggacatttattagttaaatttcaggtagttaaaagttatacatggatttttcagggagttgaaagttatacwtggatttttaactgtgttagggagggggctcagcatccctaacccctgcattgttcaggggtcagctatatttgagttctgacatatttgtccatttatggattcgtcttaccattcatcagtagatcttttttttttttttttgagatggagtcttgctctgttgcctaggctggagtacaatggcgtgatcactgctcactgcaacttctgcctcctgggttcaagcaattctcctgcctcagcctcccgagtagctgggattacaggtgtgtgccaccacgcccagctaatttttgtatttttagtagagatggagtttcaccatattggccaggctggtctcgaactcctggcctcaggtgatccaaccgcctcagcctcccaaagttctaggattacagggatgagccaccacgcctgacaccatcttattttttaatgcattttgaagtaaattgcggacgtcacccacaaacacttcatcatgcatatatgtaatatgtttactttttttttttttaatgagatgagatcttcctatgttgcctaggctgatcttgaacttctggattcaagctatcctcctgcctcagcatcaaacatagctggaactataggcacattgccactgcccaactactaatttttttttttttttttttaatttgagacagagtctctgtctgtcatgcagtttggagtacagggatgcaattgtagcttactgcagcctcagtctcctgggctcaagcagtcctcctgcttctagcctcctgaatagctgggaccacctgagtacggtgcaccaacatgcccagctaatttttaaatttttttgtagagatggggttttgctgcattgcccagggtggcctcaaacttctggcctcaagcaatcctcccaccttggcctcccaaagtggggtaataggcatgagccactgtgacccacctactaattcttttttatgtaaagtttacatacagtgaaatgcacaaaattaaagtttaccattaagtgagttttgaggaaatacatctgtgtaacctaaacctttgtcaatttgtacaagatagcatcattccagattgttccttctatcctcctttttagtcagtccagtacccattaccccagaggctgtcactcttgtgattgttttcactcgagattacttgcatctgttcgtgaacttgactcacacagtatggactcttgtgtaaaccttctgtgactaagcattgcattgtgcttgagattcattccagttgtttcagatatcagtagctcattcctttttgttactgagtagtattccattgtctgagcataccacagttcaggcattctcctcctgatgaatacatggcagttgtacagtgttggctattacgggccagggcatggtggctcctgtctgtaatctgaatacttcaggaggccaaagctggggcgtcgcttgagccccagcagttccatgttacagtgaattatgatcacgccactgcattccagcctgggtgagagagggagttcctgtctttaaataaataaatagttggctaatagaaataaaaccgctttttattataaaaaggcttgtacaagcctttgcacagacatttgttttgaatttttttggtcatagtattggtatgtgtttagttttataagaaattgcagtgattcctcagggatctagaactagaaataccgtttgaccyagcaatcccattactgggtatatacccaaaggattataaatcatgctgctataaagacacatgcacatatatgtttattgcggcactattcacagtagcaaagacttggaaccaacccaaatgtccatcaatgatagactggattaagcaaatgtggcacatatacaccatggaatactatgcatccataaaaaaggatgagttcatgtcctttgtggggacattgatgaaggtggaaaccatcattctcagcaaactgtcgcaaggacaaaaaaccaaacaccacatcttctcactcataggtgggaactgaacaatgagaacacttggacacaggaaggggaacatcacacatcggggcctattgtggggtgggggggatgggggagggatagcgttaggagatatacctaatgtaaatgacgagttaatgggtgcagcacaccaacatggcacatgtgtacatatgtaacaaacctgcatggcacatgtaccctagaacttaaagtattttatatatatatatatgtgtgtatatatatgtgtgtatatatatatatgtgtatatatatgtgtgtgtgtatatatatatatatatatatgaaattgctaggccttatctcaaagtggttgtaccatagttacattcccaccagtagcttttgaaggttgcttttcattcttgccaacattgttgtcagacttttaaatctgaccattctgatggatatgtaggggtatttaaaatttcatcaaaattcttttttttttttcatttgaaatgcttttttttttaaattttattattattatactttaagttttagggtacatgtgcacaacatgcaggtttgttacatatgtatacatgtgccatgttggtgtgctgcacccattaactcgtcatttagcattaggtatatctcctaatgctatccctcccattgaacaatgagaacacatggacacaggaaggggaacaaaattcttaaaaaataaaatttcatcaaaattaaaagtttagttcaatgcaaattgaagctacgatgaaaaatctgagttttttcttctctgatttgtgtttttgtgtattatcccagaaatctttacttaaagttacagagattttgtttttttgtttgttcttttttttttttttttgagactgagtctcactctcacccaggctggagtgcagtggcacaatcttggctcactgcaacctctgcctcccggattcaagcaattctccttcctcagcctcccgagtagctggtattacaggtgcccaccaccacacccagctaatttttttgtttttagtagagaggggttttcactatgttggccaggctgatctcgaattcctgacctcaagtgatccctctgccttcacctcccaaagtgctgggattacaggcgtgagccaccacgcctggccttctcctattttcttctaggaattctatagtttcagcttttacatgtaggtctatggtttattttgagttaatttttgtttaaagtgtgagataaaggttaaagttttttaatatgcatatgcagttgtcctagtaccatatgttgaaaagatttttcttttcccattgagttactttggtaactttgttgaaaatcaattaagcatatatgtataaggatatttctgaactctaaattctcttccattgacctacaggatttgtctcaaatacactactgcctttactattgtagctttaaaaaagtcttaaaatctgatagggagagtccccttccccaaaagatttttaggtattttggttgttttagttcctttgtacgtctatataaattttagcatccatgtcacattttgcttggaattgtattaaaaatctatatataattcacctgtggggaattactattttaataatattgaaccttccagtcaataataatggtatatatcctcatttacttatatgtttagtttctttcaccaggattttatagtttttatcatacaggtcttgcatgtgtttcataatttattccaaaatattttatgttccagtatgctttaaaaattgaattatttggctggacatggtggctcatacctgtaatcccagcactttgggaggccaaggtgggcaggtcacctgaggtcaggagttaaagaccagcctggccaacaaggcaaaaccatatctctactaaaaatacaaaaattagctgtgtgtggtggcgggtgcctgtaatcccagctacttgggaggctgaggcagggagaatcacttgatcccgggaggcggaggttgtggtgagccgaggtcgtgccattgcactccggcctgggcaacagagtgagactccgtctttttaaaaaaaaaaaaaaaattgtattatttggccaggcgcggtacctcacacctctaatctcagcactttgggaggcagaggcgggcggatcacaaggtcaggagttggagaccagcctggccaaggtggtgaaacctcatctttactaaaaatacaaaaaaaaaaaaaattagccgggtgtggtggcgtatgcctgtagtcccagctacttgggaggctgaggcaagagaatcacttgaacctgggaggcggaggttgcaatgagccgagattgcaccactgcactccagcctgggcaacagagtgagactccatctcaaaaaaaaaaaattgaattatttttatttcatttttcagttgcttgttgctaatacatagaaatgcacttttaaaacactggccttgtggctgggtatgctggctcactcctttaatgccagcactttgggaagctgaggcaggcagatcacttgatcccaggagttggagaccagctgggyaacatggtgaaaccctgtctctacaaaaaatacaaaaaattacttgggctgtggtggcacatgcccatagccccagttacctgggaggccgaggtaacaggatcacttgagcctgggaggtcaaggctaccctgagtcatgatcatgccactgctctccatcctgggtgaaagaatgagaaaccctttcttaaaaaaaaaaaaaaaaaatacagttgaccttgtgtcctgcagtcttgctaaattttgttagttcttttagcttttttacatgttccttaaaattttctatatacaagatcatgtcatccatccttaaacaaaaaacagctttacttctttttttccaatctatatgccttttcttgttattagtgctttatatcagggctaggtcttctagtaaaatgttgaataaaagtagtgaaaatggacatccttgccttcttcctgattttaggggaaagatgttagtctttaaccataaattatgatgtaaattgttggttattcatagataccctttctcagattgactgagctcccttccattcttaatttactaagagtttgtatcaggaatgggtatggatgattcgcaaaacttttttctgcatctactgatctaatatattctgttaatggagtgaataacattaattgatcttttaatgttaaatcagccaggcgcggtggctcacgcctgtaatcccagcactttgggaggtcgaggtgggcagatcacctgaggttgggagttcgagaccaacctgaccaacatggagaaaccctgtctctactaaaaatacaaaaattagccaggcgtggtggcgcwtgcctgtaatcccagctactagggtggctgaggcaggaaaatctcttgaacccagcaggcggaagttgtggtgagccaagattgtgccattgcactccagcctgggcaacaagagcgaaactccatctcaaaaaataaaaaaaaaagttaaatcaaccttgcatagctattaaacccattttgtggtcatatattgtcctttttgcattgctgggttgaatttgctaatatttcattatggatttttatatctgttttatgaatgattttggtttttatttttctcgtaatgtcttcatgtggttttgttatcaggatagcgctgacctcataaattgagttgatatgttcttcattctcttctatttcttaaaaagtttgtttagattagaattatttcttccttgaagccacctgggcctggaattttcttttttagatttaaaattatgaatccactttcaaagggctgtttatgcattctgttacttcttagtcaattttgataatttgtgccttgaaaggcatttatctaatttgttggcataatattgtttataattttccattgtccttttattcctgtaggcactgtagtgatctttcatatcccttattagtaatttgttttttctttctttttctgtcttggtaaacttccattaactttcgtttttttcactaccgtttgtttctttttttttcacttatgtatgtatttatttatttaaaaaaattttttttgagacagagtctcactctgttgcccagtcaggagggcagtggcgtgctctcagctcactgcaacctctgcctcccgggttcaagcaattctcatgcctcagcctcccaagtagctgggattacaggcacccgccaccatgcccagctaatttttgtattttttggtagaaactaaaaaacgaataaggccatcacacccggccttatttattttaaatttttgagacagtgtcttgctatgttgtcgaggctggcctggaactcctgggctcaagagatcctcccatctccatcccctgagtagctgtttctcttttctgtttcatttatttccattcatactttattattctttcctttttactttaatatatattatagtgttttaagcttagatctgaaaccttctcttctaacacaagcatttatctttaatttttttttttttttttttagacggagtctcgctctgtcgcctaggctggagtgcagtggcgcgatcttggctcactgcaacctccgcctcttgggctcaagcaattctcctgcctcaccctctcaagtagctgggtactacagatgtgcaccaccacacccagctaattttttgtatttttagtagagatgaggtttcaccatgttggccaggctggtcttaaattcctgacctcagataatccgcctgctttggcctcccagtgtgctgggattacaagggtgagccaccacacccggccaccttttatttttgaccacatattatatgacttatttatatggaatgtccagaataagcaaattttttgataccagaagcacatgcgtggttatccagggctgagggaggggactggggcgaatgggggagggatctgctagagaataaagagcttcttttgggggtgacgaaatgctctaaaattggttgtggtgatagttaaacaactttctggatatattaaatgccactgaattgtatactttaaatgggtgaattgtatggtatgttaattgtatcttaataaaaccgttactaaaaaaatacaaggtgcctctcactagctgtgtgacattgaagagtgatctcacctttcttagccttagtttacttatctgtaaaatgataacagaagctacctcatgagattgctgtgatgtttcagtgggaggattgtgtaactattgagcatagaagtacttaccttttaagcattgctttaactgtatagtttcagttttaaaatttattcagtttgttttttaacccaagcatgtgaattatcttggcagtggttttatctgcacttgaaaagaattcagtgtattctgctattactagatggaatgatataaaaatgtcagtttgttccatttgatattaaactaaattgaagagtgttctttgtatcttctgtatttttgttgattttctgtctgctttttcaatttctgaaacagtagtatttaaacctctaattagggctgggtgcagtggctcacgcctgtaatcccagcacttggggaggcccgaggcgtgtagattggttgagctcaggagttcaagaccaacatggcaagaccctgtctctacaaaaaataccaaaattagctgcgcatggttgtgcacacctgtggtgccagcttcttgggagactgaggtgggaggattgcttgagctcattgcaaggctgcagtaagccagcctgggcaacacagtgagattttatctcaaaaaaaaaaatttatttttgtaatgtgtgagtgagtcctataggtagagagaagttaacatttgtatgtatgaactgttgcatgaaatgtacagaaaagtagcaacttcttcaggaaattttaaatgtatggcaggattatagtttatagaacttaccaaatgaagaagaatttctaggccgggcacggtggctcacgcctgtaatcccaacactttgggaggctgaggcgggcagatcacctgagttcaggagttcgagaccaggctggccaacatggtgaaacacctgggctggagtgcaatggcgtgatctcaactcactgcaacctccgcctcccgggttcaagcagttctcctgcctcagcctcctgaatagctgagattacaggtgcccaccaccatgcccggctaatttttgtattttagtagagatggggtttcagcatgttggccaggctggtctcaaactcctgacctcatgatctgcccgcttcggcctcccaaagtgctgggattacaggcgtgagccatggtgcccggctgccccagcctcattttaatttccaaagcaatatctttttatttatttaacatatacttgttgaaattctatatgtgttaggattttccccccagtagcatgaattatatggtttccacgtgatacagagcatagtgtctagcaacaataggcctcagtaaacatttgtggaataactcactaaatgaatatattacattgattcatctgaaactgtcatttttagaggtcaaaatggttaaatatcagcaattcaatattcaacaaatatattaataagaatcattccagtataaaagtgaaaatacatattactccttgacactgttatcaatgtgtataattttctttcattagactacaaaacttgacttttctcttctttgcctaccaggaaacacgaaattatccagaatcatatccacaactgccaagggatgaaacagtggagaatcctcatctccagaagcacattttggaattagcatccattctggatgttcgaaacgtgttctttgagaataccattgatgactattaaaacaaaaaccctgttgtcgaaacaagttttcattttccacaaattttaaatggtgcagttttctaacgtgataagacacatagtggtgttacttagtttttattttttaatttagggccaccattttaaaaacaaacaaaaaaatgttcacacttttagggtaactgttttaaaatgcaacctttcaggtcttttaaaatcttaaccttggaatttttattttttgattttgagggatggatatttacctccaacttctaatcctacactcaaatagtcactattctcaccctgagaagagtaaatcatttatttttgtataatgaggtaaatccaactcttatacttggacctaagttaaatgtctggatttggaaatatgtaatggttcataatgatgaagctagccaccatggactactgaaaatcaagaacagagtccctccataatatattttttctcattccaacttagctggtagaaaaatgtttgatcctttgaaacatgatcaagccagttttttgaaatcatttaatttctttcaatactgtcataatttcagaaattggattgaattgcatctgaaagctacatcttgattgaggacttgaggtggtaatattacttggaatgtatgagtattatgagatttatttgcatattttctttgtagtctgtgaatgctggaaatgaaaaaggaaacaactttgaaatattttagtcaaaaaaccatgtcattggtttcataatacaatgtctccaataggaattctatttaaactcttggtttatgagatcacatttaaagactggattgatgtctgtgacataaagttttaattttttgcctcattcaaatttatgagacttcaaagtcatagatgttttaaattttggtaaggggtaactgggtgttatgaaacctaaaatgtaagttgattttgcattggtaatttggaaataagatttattaacattccctgtatttagtattttatattcatgcacaaaatttttattatcttaaataggactcagtgtatattataaagatttttcttttttgtgttttccttccctgtcattccctttataatttcacagtcacttgctatgaagtcctccctcctttttgattatgcagcattcaatttcagaaatctatgaatgagaaggccttatacctaattttctgtacaggatcacatctggcagtcccaggagaagtgagctgattgcttttgatatctctttcccatggccctaggtaaattatactctaaatttatttattttttttgaaacagagtcttgcttttgttgcccaggttggagtgcagtggggctatctcggctcactgcaacctccgcctcccaggttcaagcaattttcctgcctcagcctcccgagtagctgggattacaggtgcccgccaccatgcctggctaatttttgtatttttagtagagacggggtttcaccatgttggtcaggctggtctcaaactcctgaccttgtgatctgcctgcctcagcctcccaaagtgctgggattacaggcgtgagccaccgcacctggctattatttttaacttggttttcatttctggcatagagactaatttgggtctaagttattcccattcctgctttgatttgctgatttttcaaacctgaagtccaaagttactgtttttggggtttggggacttggggagtattttacttttttttttttttttttttaagagacagagtcttgctttgttgcccaggttggggtgcagcggtacattcatggctcactgcagcctcaaattcctggattcaggcaatcttctcacctcagcctcccaagtagctgggactacaggcatgcgccaccatgcctggctaattttctttattttttaattttttgtagagacatggtctcactttgttgagcaggctggcctcaaactcctgggctcaagtgatcctcctgcctcaacctcccaaagtgctaggattacaggtgtgagccactgtacctggcctgtttactttttaaaaatttttttgtttgttctttcaaacagtatttcagaaagcttgggaaaagttaccctggaaagatttcctttgctagtgggttttcattttcaggtaaagactgctttccttttttttcagtatcttaataaacttcatagctttcctttagtaacagtgttcattgaactacagcaatagactatcttcggttttctgacctcttgtttcaattccccttaagtcctgtgccagttatgctcctaccaacacagagtttcctgtcctctaatgtttaaaatagtatttactgttctgagctttatcctcccccgttaagcataaagaacactggtctgagaactaggagacctaagttctagtcctggctttcctggtaacttaagcgttatgccctttgacaactgtcttcatgtctctgcttgttagcactctcatctgtaaaatgaagaggttggcccaggtcttctccaactctgattctgtaatttggactcttggttccaaaaatattgatttccccactccaaccaccaagagaactatttaccctgtttgtagtgtacacaaccttttcttttgtaagtcatatttacctagattttgttcaagaaaatctgggtcccacttagctgttttagaaactagtacagacagagactctcctgaggaaattagagcttttatgattagaaacatgcttgtctaaaaatgagggtcttagaaatcacaacattgacccttatgatgttgccccttaagctaatagtgtaattccttactggtagttaaaaatctaaagtggactgaagtgatcttgaatcttcaaagagaggaaaactgtgctggaaaatgttattgtttcattgatgccttcaaaaaaatgcgtattaaacaaagactatactccagattttcttctgggcattggggaagcaaacaaaatagacttaaaaatcctcatgttcatgaagcttacattctagtagaaggagtaaggcaataaacataagtaatttatgttagaaaatgttaagtaggatggaaaagtgtagattatggtaaggtaaatcttttgtttgttttcttaagagaagaacaatgtttaaaagagtgatcaagcagggcatggtggcatgaccctattagtcccagctacctgggaggccgaggtgggagggtcacttgagcccaggagtttgtggctgcagtgagctgtgattgcaccactgcactccagcctggatggcaaagcaagacctcgtctctggaaaaaaagaaaagaaaaagtgatgatcagggtaggcttcattaggaaggtcacatttgcatgaacactttgccttttctttctttttatgaaagttttaaacatagtttttttgttttttgtttttgagacggagtttcactcttgttactcaggctgcagtgtggtggcaggatctcagctcactgcaacctccaccttccagtttcaagtgattctcctgcctcagcctccccagtagctgggattacaggcatgtgccaccacacccagctaattttgtgttttgagatggggtttcaccatgttggtcaggctggtctcgaactcctgatttgaggtgatccgttggcctcggcctcccaaagtgctgggattacaggcatgagccaccacgcccagcctaaacatacagtttaataaatcctccttgtaccttacccagcttctgtatttctttaatcaagggagaagaattatctaaaaggacagttgcccaatgggcttgagctgatgatagtggcaaagaatttcattttttaaaaatgcataccacctgccctttataaaaaaatttaaaccctaatgtatttaattttataattcataaaaatttaaatattggaactaagaacagagcaaagcaaagggaaaaagcactcctttgttttcaaattgcacaaactgtccctggagattctgatagtctctcatctctcttaactatcactgtaaacaacatagaaagcataagactgcaagaagtcagttatacacaaaacaaaatgaagcacagtggaattttctctttctttatctgtatatttctgaagttggtaaagcaactatcttctctattttacagaagagaaagctgagacccaaaaagctattcatagtgatagagctagaactaaaactcagatctcctcatctcagcccagtcttctcagtagctcagactgctttctataatgaacaagaaagaataattagggatttgtattttggcacaaaacagtatcaaatttttattgtaaaaatccacaaatctgacattttatcttttattctagccaggatgtattcttcatttgcatgtgtgtgtttctcttagaaagtggtgctctcaaacctttcaaagcacagaatttattgtaccctctttatttttaccaaattgaaacgtttcaggatttcagaagcaaagtgcaatccaattgtggctggagttttcctgatagaggatccgggtggttccctcccctccaacttctggctactgccctttatttcctttgtgcaatagaattccctgaaacagattatgtcgtaattatactgatttagtcaggataatgggaaaagcgacaaatcggatttatgtattaggtattatggagctttctttagcactctcctccaagtttaatctctgacatgtgtgatatagtaactttctgtctctgagaagcagtttggacccagctgaaaaattttatttatggagacttgtaatcagcctgatatacagagaacactctggactggaaatatagtcaggtaccaaggtctgctaatttggccattgccagtgattcaaaaccacctccccaccctgagtaaaagatttgatatgaatatgaatgctatgagtctcctggtgatgttttgggtgtatatgttcctgtgtgtgtttggaaatcatagagggtatttaccttgagggctcttttgttgaccttatttatttgaaattcttattttatttgtaatggcatatgtatatttttgtgatgctacatgcaatctctgtgtatactttttgtatatatgtatacatatttgtaaatatattggtatgcagtgatacagtatgtgtatattatgtacccatacccattgtgggctgaatttatttaagttctgtgaggacatcctagtggcattgttcatgctgctgtaattaggttgtggctgtatctcattcataagcctctattttgagaggcttgtgtttggataaaatgggctaatttggagttgaaattaggatatgaagatcttaacagaaagctagatatttattcttagctttaaaatcacctgcaaatttttatttaaactgatgataaattagtgatataacctgaaaaacctaagtatgtgaaactgagacaccagcagattcttaggctgtagtagtcctttattttcttgatccatatttaagtattattactgagtagtaaattatgtatattggggcttaatagagaggctgtggaaaaaaattgctttaatcacatttaaaaacataggaaaatgtccattaaataggggaaatatattcccagttgtcatttttatgcctcatactgaattttgattttggaacaattcttttttcatcagtgttttatgtgtctctatgaggcagaaaagggggcattagctaagggatggcctaacctaagtaggataggatttagtgaggaacgggaggttgttaatttgtatatttgcagcagctatgattaatttagtcctgtcttggcatttccggctacagattttttcttactggacttgcatatcaaaggtgagtaggctcatctgagaaaatgcttccactgaataaaatgccttcactcgtattgctgtgtctctatgagaccacttgtgttctgcaagttgatgatatattcgcacatgaagtagagtttttaatattagatgcatggtgtgctataaaaatctgggccttcaaacctctcccaaggatgatagggttggggaggataagagg

SEQ ID NO: 97441 - DNA, 72721 bp, Homo sapiens
  misc_feature (1)...(72721): n = A,T,C or G
ggccatttcccttcacttacaacatgattccacctctacttcagtttcattgtgccttcctactataccctgaaactttatttcaaagaaagcatgtgtgtgatactcaactgaaccttttatttcaactgtggccaaccagacaactcagaaggtgacttcatggggacactcagctggagaggaaactgagataaacccaaaccagtcatctctgatggacagaaacgcctcataaggcaaaattgggatatgaaaagaaactctcctgcctccacaattagatagcagctgagattgtaggacaaatgaaaggaaccacaaataaatctttctcttactccccaatccttagtgcatctacccagaagcaacatctagtaagtttcttcggtgacctgagacattctctgtctatatgtacatgtaggcatgtatttttctttcttctttaaatatcttggatattattctctgtcagcatacacatctcattctttttaactgctgaataaaattgcatagtatggtgctatattttatcttgataattccacattatggacatttaattgcttccagtattgcagctacaaaaatgatgcaattgactatcctatgtatgtatgtatatctttacacgtgtaaggattttttgaattttcaaattgctcatttttacattagcttccatcaagatatgggcagaaaaaaaatgaatagaatattgttcgtatcatcacattgagaaagaatggcctttcccttcatgttgtttgaataagagtcattaatttgttttccttacatacactttaagacaaactccaaagcctttaataattaaacccacccatcttcagataaacacatgatacgctgtgaggggaaaacactccctgaacatgttgaagcacaacattttgcaatgcagcataacaagaatattgagtgctgacagtagcagaaacattatgcaacaaagattggggtcattttttgagcaaagttaagcagcagactgcaaggccaagagtgagctggaaaaagccacagaccaaagaactagggctttcacaagagtagcaattttctattcaccagatcagggcagagatttgtcaagcattatgggagcgtgtgacatatttgagaaacaaaagaacaaggactcagccataggagctgggcaagggaacaatcaacataggttccagcagatggaaaggctcctttgagaagtaaagcccccacgaggcgagtaggaggaaagcagagacattcctgcatacttactataaagcaggctctaaaatgggaagaaacagcatattcaagaaccgtaactggatgtaccagattataaagtggaggatacataagagtattagtccgttttcatgctgctgataaaaacatacccaagactgggcaatttacaaaagaaaggtttcatggacttatagttccacgtggctagtgaggcctctcagtcatggtagaaggcaaggaggagcaagtcacgtcttaaatggatggcagcaggcaaagagagagcttgtgcagggaaactcccgtttttaaaaccatcagatcttgtaagacttatccactatcacaagaacagcataggaaagacccaccctcatgattcaattatctcccaccacgttccccccacaacatgtgggaattcaagatgagatttgggtggggacacagccaaaccatatcagtaagggatggaaagaagcaggacacagtcaaatgatgcaagctgctaacagccaggagaagagggctccttatgtgtcacctccatatgtttttaaaaccatgcatttaagttacacactctagtaggcagaataagtcctcccaaagacatccatgtcctaatcctcagaacctgtgaatatgttagctgtgaatctaacctgtgaataagttacatgacaaggaggaattaaggttgctgatagaattaagcctgctaatctgctgacctttaaataagattatccaggtgggcccagtataacaagaggggtcttttaaaaatggaaagaagggtcagagatttgaagatgctgcattgctgctggctttgaagatgaagagaacaaatcaaggaatgcagccaggctctagaggctggaaaaggtaagaaaaaattttctccttgagctcccagaaggagccacccttgcagacagcttgtctttagcccagtgacacccatttcagactttcaacctccagaattatacaataataaagttgtggtttgttaagccactgagtttgtggtgacattacagcaacaataggaaactgatacacacagggagaatctctactaatggagttcctaaaggtcatttgtagtttatgtgttttttttgttttgtttttcttttttaacactgatatatcccaggcactgtgctgaatgctaaaggctcaatgataacaactcctgctcacgaggagctcatagctggccaatcagggcctgctacctagcaggtattctgtattcactgagtgggtagatgaatatttagacggatgaattgcctataaggccctccatgacctgatgccccaccactttactgacacagtcttttgtctctttcctcctcattcttactacccttggctgttctttgaccccattaaacttgttcctgcctcagggcttttgcacttgctgttaacatcttagaatgttcttctcctaaatatttgcacaatttgttgcacgatttgaggtatcttctcaatgtcatcttgtcagagaggccctgtttaactacactatgtaagatggcacacccctcccgccatggccacatcaccttctaaatcccttacctggttttatttttctccataactgtttatcatgttttctttttcttttttctttttttttttttttaagatggattcttgctcttgtcacccaggctggagtgcaatggaacaatctcggctcactgcaacctctgcctcccacgttcaagcaattctcctgcctcagcctcccaagtagctgagattacaggcacccgccaccacacccagctaattttttacttttagtagagatggggttttgccatgttggccaggctggtctcgaaatcctgatctggtgatccacccgccttggcctcccaaagtgctgggattacaggcgtgagccactgtgcccagcccactttttcttaaggtgactcttctggctaagggagtcagtgagtcctgaaatccagcccactctctgttcccaaagctgtactccttagcaggggtctgagtctggctggaggaaaaggctttttccaaattcatacactgtcactgcatactccctaagccttctgcctttttgtaacttgcagagacaccatactgtttactagcagctctgtttttcttcatctagtagaatataaattcctggaaagcaaaatcattatcttatttgttcacttttgctttcctactgcttagaacattatctggcacatagtaggtattccacaaatatttttgtctgggtggatggatagatgtatggagattggagaaacttgcaaataaacagaagtgccagtacaatgtgagagtcatgatgagattgtggacagggtactgcgagggctcagaagcaaggcatctaaccctctcttgagaggccataaaaatgtgttccaagcgaaagtttatttggatttccttgccttaaatttcacagttcctgggataagaatagcttggagataatcacatttgatttggggttgttagagcctagaaaaaccccccatactgcttcctctatgcaatttctgcaatagcaatgcttgccacctctacctccggatcaggggagggaatgtgaatacacacggtggaaacgcactatccacttagattagtgggatgccattctagagttagtgaacaaacctaaaagtgtatatactacaactaaagcttacatttgggggacagggttaacatgacaaggaaagaaataccaaaaaacttcaagagtcctcaaagttctggctggacggtggctcacacctgtaatcccggcactttgggaggctgaggcaggcagatcacctgaggtcaggagttcgagactagcctggccaacacagtgaaaccctgtctctactaaaaatacaaaaactagacagacagtagtggcacacatctgtaatcccagctactcgggaggctgaggcagcagaattgcttgaacccgggaggcggaggttgcactgagccaagatcacaccactgcactccaacctgggccacagagtgagactctgtctcaaaaaaagaaaaaaaatagtcgccaaagttattttattttgatttataatttttacagatgcaggcaacatgcttccggtcagagctaatgaaatggaggccgaattagagcgttggctttaggaatgggaattcagtgcctgttctggttcttctctccacaattatcagcaaaagcaaaggtttagaaaagagacattacctttaatatacttagaaacaatctcacagccatttcctagaatgaaagaacattaaaacctttcaatttgatgaccaacttaacaaggggtaaaagaaataaatgttggagaacaggaaacaggttcttcctttttactcccatacatgttaaatactgttcatagagtcacaaaaatcgtttaccccttacagaaacctggaaccagaaggcgcttcagaaagcaagtggtacaaaaactttcaccgtataggcaagaaaattgggacccactggccgtgactcggcccaggctacagagtcaaaaccagaaccttgacattctgaaatcaggttcattgctgtcatcattgttccatgctgagagttttcttaggaaaaagaataaagtgggggaatctttccaaaattgtgactatggagctcgaaagtacagatttaaatcttgagttaacagaccatacaggttttacttaagagatattcaagcaaactcatttaaataactcctccaacctaactccaaaaaggctttcttggcagtcttggatcaatggcaattaaacttccagcctagagctggaaataacaaacaccaaacgtaaacaccatctttcacattctcaatgttctccttgtctctctacctagtctgctcttttctgaaaacaactgggacacattcactccaacttgacttgccataggcctagtctatgatagggttcataataacatccttcaacatagcgttgcaagagctggcgctgtttctttgggtatggccacaattgcctctgcaccttgtgtgtattacacacactgtattccatgccaacgaaagggtaagatatggctgcattatttagggctaagtgctaaataaataatgaacagctaaccattagcagatctagtagtcgatttcttaccctactctcttcctgcaatcagctttcctaaccatgcctagctccaatcttactgggtaacacagacggtgccagcacagtcaacagccatatctaagcctttcctctggggtccataaaaacaaaactcccgaggagctgtgggggtgcaccgtggccagggatcgtcgccgaatacagcccgcacacgtcgcagctttaaataagtagggccgtggggcccggcgctcccttccatccttggacggaatgtatcttctcttcctacgccttcacctccgaggggtaaggtctcgtgagatacaatatgcagaggccagttttggggcgagccggaggccgggcgcgtctaacctgcggggaagggaaagcggagggtaaggcaagggctgctgtaggcgccagacaacagggactctccgaaccggaagtgccccgcgtcgccatggctacaggcgctcccagcagaacccgtagcgttccgttcccatggcaacggtattgtctccttggccggacctgggctgcggaaggtaactggggacgtcgcaggctgtgcagctttcgcgaggcaccgctttggcgcccggaccgaggtgcgccagggtcaggaggccgacgcagcgggaggaagccgcgccgtcgggctcagggagctgrgaggctggttccggggcgtggtttctccgccttgagccaggtgccctttgcgcactcgcgcgttctcttagagcctccgcggcagagaggctctcagagctcgacctgcggcgtcagggcttacagacttgccgcagaaccacagcgggaaaagaggagcgattcgtccttgaggggctcagggccgtgcggaacgtcataggaacagagtccgggagtttgagagatcagaactctttgctgtgggcatagtgtttaaagtggaggttaaaaagagaaattagtgactctccctttctgattttcggataatggatgctctggagcctgggtcagaaagccactcagggctcggtgggaattagtgattctggagggtgaaaggagaggcgacttggtggatgttaacattcaataagtaactgcgttcgatttgggtttgatttaagcgactggcatagccttccttgagagttgaatttcacaaatactgtatttagaaatcacatttttcgttttgtgcttccgaggtttctcctatcatctaacagcaacaactaaaacagacacatgaatttcattttattgttttattttattttgagacggagtctcgctctgtcgcccaggctggagtgcagtggcgcgatctccgcctcccgggttcaagcgattctcctgcctcagcctcccgagtagctggaactacaggcgtgcaccaccacagccgactatattttgtatttttagtagagacggggtttcaccctgttggccaggctggtctcgaactcctgaactcgggtgatccacccgcctcggcttcccacagtgctgggattacaggcgtgagcctctgtacccgcctcgtgacccctgtactagaatctgctattaattagtgaaatgaccccgggggggggggggggaaagcagaattaaccaatacactggctgtgcttcgtttaccactgagagttggttgcttwgcttaaatccaacacgccgtcagacctgcaaaaacaatatctgagttaagtaggtgaccatagttttgatgayccaggaactgtaaatgtgcttgctttgagacataaaggccagggattttggagaagtagggtggagttgaaattaggggaaagaaatttaacttagacatttaatttggcaaatgtctgttttccagcggtctccatatctaagtatgcgtagtctgtggatttaggatgggttatatatttgagcagttttagtttaatgttaatagcaaaccagagggggaaaayagaacagacacccagccttttctctcaaagctgaccttacctgattcttggtaggaagaagatgcaagccagccccatccgtatcccaactgttagcaatgacatcgactgggatttctgcttcyrtatgtaagtatcacagcattttgacatcacaggtacttactgggctgaaacactgggacctcctgcttaaggcaaacctgggtgaggagctttgcatgagaagcgttcacgaccagcctgaccaacatggtgaaaccccgtctctactaaaaatacaaaaattagctgcgcggtagtggcacgcgactgtaatcccagctactcgggaggctgaggcaggagaatagctgaacccggaggcagaggttgtggtgggctgagattccatcactgcactccagtctgggcaatagagaccctgtctcaaaaaaaaataaaataaaataaaaaagaaggttgtgtttctgatgtgctttaataatgattctgctataatatctgtttgtatttacaacctatgcatgatagaagattgctttttcccgacttaaggaaattttaaaagtttttaaaataaaaataggttagttataacaagattggcaaaattgtagagagttagctataacaaagttaatgagaaaatttttatgaaatagagtaaataaaactttcgtatcgtctaatacttattgagcacatactatgtgccaggctctgttctaagtaccttaaacgtcttagctgatttaatccccccaagccctgtgaaggagttactgttattggtacattttatagatgagtatgaatcaaagagatgttagggagtttgcccaaagttgcaaagctagtaaatggtatttaaactgggcattctgactctagaatccattcttgttttgttttgtttcgtttttagagacagccttgctctgtcacccaggctggagtgcagtggtgcaatcacggctcactgcagccttggcctcttaggctcaagagatcctcccacctcagcctcctgagtagctgggactacaggcacacaccaccatacctgsctaatttttacatttttgtagagatgsgttctcattatgttacctaggctggtctggaactcctgggctcaagtgatcctcctgcctcagcctctcaaagtgctgggattacaggcatgagccactgtgcccaggtagagtccattctttaaccattctctatagcagggtttctcggtctctgcactgttgacattggggttggataactgtttgttgtggagggctgtcctatatgttgtaggatttttagcagcatccctggccaccatccactagatgccagtagcactagctccagttgtgacaagcaaaaatgtctctagatgctgccagatttcccctcggggcaaagtcatccttagttgggaaccattgctctataccagtgtcatcaaatagaaatataatgcaaaccacatatgtaatttaaaattttctgctacccatattaaaaggtgaaatgaaacacatgaatttaatttcaatactatattttatttcaatatatacaaaatatgctaaaattattaatgaaatattttatctttttatactctttaaaatacagcacatattttacatttacagcacatcttaattcagaccagcaatatttcatgtgcttgatagccacatgtggctagtagttaccaagttggatagcatttttttttttttgagacagagttgtggagcaccagattctgttgctgtttggggggcccctatgtaacctgccacaatccctggtggactgaacaaaggaggggtgaatgtgggaataaaagacaagagacaaaagagtatacttggaagaaggggtcagggggcaccttgcctctagtggacgaaggccctgagctgtacrcagccctctgtatttattaggcaaaagagatggtgagaaggggggtggaagaaggggtcagctgcttagtccagagtaggcttgcaagacttcattcctcaaacaacaggctctagatgtcacagtagataacctcagcgctagggagtgattgcctccagcaaaccctctgtcggcaggagcactcgtgagtttgctcacatcctgcattcatgataaacagtttgctgtttgatcatatcgtctccagtggaatgctgagttggtcacatcccatgggccttcggctcccagcacagagtcttgctctgtcacccaggctggagcgcagtggtgtgatctcagctcactgcacccttcgcctcctaggttcaagccattctcatgcctcagcctcctgagtagctgggattacagtctcactgtggtattttttaggagatacagggttccaccatgttggccaggctggtctcgaactcctgaccgcaagtgatccatgcacctcggccttccagagtgctgggattagaggtgtgagccactgtgcctggcctggatagcataagtttaaattcataaaatatcttaaggttaagggttatatgactataaaaattgaagttcataaaaatgtcaagttcacagtaaaatatctgggaaataatcggataatttatatcgaacattactaatcagaattcctattcatgatggtaacatatggaatcaattataaacctggcaaggcagaccttccattcaacctcctattctttttattctgaccatcctttgagatgtctgactggtcaggattctccagccatctttctcaccttctataacatgatgttcaaagctagttcagggatttacattctcaaatcatttgtcaagacctcaatgtttctcattcctttgaagtccctgaggttgaagcttgccacctttggtcttaccttaatgttattcaaggcttaatttaaaatatttcgggcttataatttttactatccataattagcaatctggtgactccaatagatttaacttctgytctaggtctgtgaaatatgcagcttaagcaaaatttgctattgagatatgatctcttttttttttaactgccccttgcagaacagggctagctcataggcagcatgcccagagtcagccgacttatgatctcttgccacagatttcctctctcctcaatatttttcaaacattctaaagactgcacattcttttctcattcatttattcatcatttaacaggccattatttgtttttactatgagccagatatcaggttttcagaaacaaatgaggctcagcccctgccgtattggagtttactttgccagcaggcaaagaagactcagaaacaaacyaaagaaacaacaataaaaaaatcaaacaacaataaaaaaaaatcacagtgtactagcagtttgggggaaatttttgaaagccctttggaggctgcctttattgctactccagtgaaagacttccaggaatgatgacatctgagttgtgtctcgaaggaggagtatggaattcaccaggcagagaaaaggaagttcatcacctgtcttctgatcaggtcacatccccaaccttccctggctgtcccatcaaattagcttgtctactgaaagcacactcgtctgtgggcagaaggcaagcctgcctgcgcttgggcctcaagaaatgttgcttccctatctacacaacctggtttgcccacgtgcctcttgataagttaattagaatagaactctagaaggatattagcatgtcatttttcaaacctggtgtaaaagattacagttggcatacagctcttaaaggtggcacagacccaaagagtgagcagcagcagcaaaaaaaaaaaaaaaaaggttacacttggcagttattttcttcttgtgcttttctgattttttttttatttaaacattgaacattcactctttaagctttttgtgcttttctgaattttctttttatttaaacattgaacattcactatttaagcaatcagtggaaaagaaaagtaaattttattttaaaaactactcagtggctgaacttttgagttattgtgagtataaagatgagtcctttgggagacttatttatacttaaaatttctaccgttgctcctaagatctcaaaattctgtttcttctgtagcactttattgatttttctggtgatgttaggatatagttctttttaacacaactagggatatttctcctctgaatctgcacttgatgtagcgtggggttccctccctgtctctggtgggacccgtgtcctcttttcttggccaccacatgttgaagcttttaagatatgagaagacatgcaaagtccagcctcaaaatgttggtttcctttcccttatttcattgtatccattttctttccttgcttggatcagaattttagaacacagatattcctggggatcctccagttcaacaccctcatttgtagaagaagaagccctgtcctggagctaatgatatactaatagctaacatgaaaggaacacttagtgaatgtcacacactgtgctgatttatgagtattatctcatttaatcccataacctcatcaagtaggcatccatattctcattttacagagaagtaaattaataacttggttagggtcatgtgattagtaagcagcagagctgtacctctataaatcggcttcttctgaactaccacattgctgtcttaatgctaggctttgagggcgacgtgagtttactgcctagctttattccttcmggtttatgttagaaatcatgtccctatcccctagttgggagagctatgcccttcaattttaccttgtttgagatggagaaggttaaatcctgaatccttgcctctctcatacctacaggtcacagcaaaccgagatcccagctcaccagcaaacagatgagttgtatcccactggtgggtgtggagagagtgaagaggaaactaaagctaaagagaaggagaaggccatagactgtatgtctcatcccaaagagaaattagcccaatcccagaagaaagtagctcagctgattaaggaaaaaatggtaaaacaaaaaactcactaaaattttgtttccatttaaaaatatgttcctgtttagagaagctttgccttcgatgcagattgaagcatatgaaatagaggaaggtgtcatatttctttgtaagtagcagaaaacaaagcagagcctacttaggtagccagcccaccttctggttccatgcatggttcattgtctgttcctccttggggcatttctggtcctagctttaaactaaaaattaggccaggtgcagtggctcatgcgtgtaatcccaacaccttggaaaaccgaggcgggaggatctcttgaggccagcgtgagtaacatagtgagaccctgtctctacaaaaaaaattaaaaatcagccaggcatggtggagggagcctgtagtcccatctacttgggaagctgagacaggatagcagcttgtgcccaggaaattgaggccacagggagcccgtgattgtgcaactgcactccagcctgggtaacagaatgagactgtgtctctaagaaaataaagtaaaaatttgaaaaacctaaaaattatcatttgattgtttttgttgctgtyacctttaacttaaaattaaaaaaaaaaatagctgggcgtggtggctcacacctgtaatcccagcactttgggaggccaaggtgggcagatcacctgatgtcaggagttcaagaccagcctggccaacatggtgaaaccccatctctactaaaaatacaaaaattagccaggcgtggtggcgcatgcctgtaatcccagctacttgggaggctgaggcaggagaattgctggaacccaggaggcagaggttgcagtgagctgagatcatgccattgcactccagcccgggcygacaacagctagactctgtctcaaaaaaaaaaaaaaaaaatatatatatatatatatatayacacacacatatatatacacacacatatacatatatacgtatatatacaaatacatatatgtgtgtatgtgtgtgtgtgtgtgtgtgtgtgtgtgtgtgtgtgtgtrtatccatcctggaaggtttcaggatgctatctcttaggtaacaaaaaggctgggatagtaaggcaggaggttgagaacaggtaggcaggcaggtctaagctctggcctggaaaggatatgggtaagatgcccttggttacagtggaatcataaacaaaccaaagggccagaaacagaaggtagcagtggaggtcaaagattccaaatatgcatttctaagagcaagtcaaagacttgagtcaaagatctcagagcaggtttgtaagcatgagtattcaaaatccaggagactgagacagcaagacgtcgactctcattattagaacacaggcaccagcctgcttccagagcatgatttatcaacagaagagcttgtaccttgacttcctggctcctcctagccaaggggaaaaaagtaatctagagaggtttcattttctatcatttgcctctgaagtatctctctagatggatatttgtaaatttatctctgtaaatgacccaaggaccttgcaaaggacagtcatcctggcctggacccattagtgattcacaaatccaggctagaaggatcatttctaaaaacacacaagtaccatctgccatggagtgtaagtgggggttttcaaggcttaaaaactccttggccagattggataatgacaaagatttagatcttaggagagaaatctgactcaaatcccaagctcatcaaattgtataaagtgaacaggtgcagttctttgtatatcagttatagctcaataacgctgtttttttttttttttttaaatcaaacccaacctagtactcctagccctgaagggcaggggatgccacatcagcagcagaagtgctgggatgacatctggagcccgtattggttgtcccggtttctccaagtcaaggagttcgaggatgaatatacaatgtccagagccaaagctttggtctcccattccagtgattttttcatggcatgatgcttcttcctcgaaagagaacttagtatttgctgtggtcagcccatggtgaactctaaaaaatgctgactaaatggatgttttggaagcatcaggggaagtttccttctaccattgcttgcttctgtatatttgagcagggggcaggtaaaacatgaagttgggtaggagataggaatcagtaaggagtgtattccttggaataacctatggtactgctgtatcttatctaacattactctttaaatgggttactttggttacctgtacattattcttcaaacgggttacacttagatctgacctaacaacactgaatcatttggacactatttttttttccttacagtaactccatgaggtagatggtacaggtttccaaayctcagaaaaggaagctgagatcaaagtggcctgccccaaagcaacacaatcagtaaacaaacattagaaccagggctgaaactttaggtttttggttccttgaagtgctattttcacttaaccaggaaaaaaatgcctgaccctatcgactygttcagccaataatggctgtgtttgtaaagtcactgaaatatatgacttgaagatacagttcggtgatttcttagagagctctacctgtcatttctataggggtagaggattattttccccaacccatctttaaccttgctaataaatgattcattcagcaaatattgaatgtgttacacctgtgtgtactgggcagataacagcgaacatgaggaataaacttctgtcctcaagggacttatcttctatttggggagataatagacaaacaatagtaatagctaataaaatattagatagaagtaagtactatgaagaaaaagtaaaataggtartgggataytgagtgatgaagtggtgtctattttagataaggtggccaaaaaaggcctgttgataagaaaagtgaaaatgaaatgagaaagtgaatgacatggaagagtgtcccaagcagtgggagcagcasgtgcacagccctacattggaagttagntggtgatgttcaggaaccgctggtcagtgtagttctagcagacagagtaggaggaaagggtggtagaaaatgaagtccagaggtgattggcattgggtcagattatgcagagccttggaagccatggtgaggactttgaattatattaagaagaaaaagcgggaagctgttggaggatttygaacaggaaagtcatgatctaatttatatcttaagatataaacacataaaatacgttttaaaatccataagtttctaataataataacaagctatttgatcacaattagaggatgctagtgaacaattcatttttctgaaagctagtaaagggcaagaataaaccatgtgtcctgcctttccaacatgaactgtactattgggtaaccaaagagtggaggaggagaaattctccttacagaattattccagctaatgtatgaagaaggaatgatagaattagtatatttgcattttataatcttttgttaattttccatgtagttttcctaatatcagagaaaaaaaagaaaaaacaaccagatagtagatgtattctgctggaagaacataccagtagccatgaagtcgttttgtaaaaaaaagaattcaaagctgaaattaaccaaacttctaaacccaactactaatataaaggcagaacagagaatggagggacatgatgagacaccatgaggacgcagtcatcaaaatttatgtctgtgggaaatactagaccaaatgactcagctttttcaaataattcgtaagaaaaagaactagagatggaaaagtaacctatagatgaaaagagactgatctcacagtgtggacagtcaaacaaattatttaaaaaattccatttctgtgattagataaggaattattgttaatattttggtgagataatgattttktggtatgtttctaagtccatatcttttagaggtatttacgaaatgttwacagaggcaacaatggaatgtctgatttgcttcaatttaaggtgaggatgggtggatgaggggtctagatatgaaacaagattggccaggagtagatcactgatcacgctacatattcatttttcatgctgtctgttttgtatattaataaagtttttcatgataaaaggttaaaagaagtcactctggctattatgtagaaagtagactgtgagggccagagaggaagcaattggaaggggctgctgtggccagccaggtcaaaggtgagggtggcctggactaggtactcatggcagaaatgaggagaagagcttggttttaggatttagggggaatgtggatccaaccagacctgatggattagacacaggatgagaaggaaagagaagagaaaaaagatgacaggtgaattcagtcctgtgttccagtgataagtccatggggtagagacttctcttcctttccaaaaagtataatcacttctgtactctacagaatactcaagcaaacaaggagctgattcgatgtgtcatcctttctcggattatttttggggaccatcactggaaatgtgcacgagctctggccaacctagcttatggctacttgacactgagaggtacttggttttcccagctgggtttgggtggccagcctctgaaggctgaactgacccacacaacctcagtgaggatgggcatgactaggagggccccttcttgcccctagctcacacattatcaggaaggaaagtccatggatgagggagacagtgtgcaaggatctaagtaataaagataataatgatgatgacagttattgagtatttagcatgtgccaaactggtctcattagtcctcacaatattccttggagggagatactattagtaacctcagtttatggatgaggacactggagcacagtgggcaaagggcagtatcaggggttccagccggaggacagtaggggaaggacaggcagggatgtacactcagcatcagggaggcagacccaataatgggacttgaattccaaaggtagaactcaagttcctggaaggtttggcttagtgaaaggtaggaccctcatcctagagaaatggtacttctggaaggtactctagtataagagaataagacaagaatctatttgctaaaactgaacccaagtgaaagttccttgagagtagaaagtttgtagtacaggctgaataaatattgggtgatacactgaggcgagagcgcatttcaggaaccagggacatagccagctcaagactctctgttccttgaccagccatgtccccctgtgtggtctgcatacattttcaccgtggaactcattgtactgtgctcatatatgctttaaatgcttcttcctctgacatagaagctccctcagggcgggactggtctcatttgatctagaacagtcctttgtacacaatatggtttggcatattactgcttatgaactgagccactggcctaggggttgttcaagtacctctgggacctcagtctgaaggggggcctaacttgtaatacaaattaaatgctttatgggcttaagtgatttgaaggctacaggaaaagggaagcaatatatttgggccataatgaggctggatatcagcaaagcttttgaaaaaattaaaattgagttcacttctcagttattgatctcagaatatattctccttcttagggctctataggcccttttacacccatttatttttaatgcaactttagattcatttattgatgtggcaagatcacaggtagctgagatcacagcattaggacagtgatgctgtgggtcacagtgggggcacagcgaggcccttttatgctttaagaacacgtgttgtgttctgaaagaaggtgctatggctagggagaggagaatgtccttatgtactggcagagcaggcagccacctctatgaaatttcagagtgaccaggaaggatcttcccctagtggcgttccgtgcttccttacttggaatctctctattcccatcagactgattttctcaaaaacttactgccttcatgataagagtcaaatttagggatttactccttcagtacttatggagttcttgttataagcctggtggcacttgcagtcagtgctggggatacataaatgaatattggtggtccctatgctctaggagcacacaggggtcttatgataggtaccattctagaggtaggaacaaaattctggggaggcagttcagtggtattgccattgaggaaagtcagggaaggctgccgagagaaagtgatatttgtcctgtctttgaagaatgagaataggtttatcaagtagatttttttactttttatatttttatttttgtagagataaggtctttctacgttgcccaggccgatctcaaattcctggcctcaagtgatcctcccacctcagcctcccaaagtgctgggattacaggcgtgagccatggcacctggcccccaagtagattttgaggggagaagtagagagtacaaagttggtcctttatatatgttgatctaaggcataggaagtgagaggagggcactctgtataaaactcgttacacagaatattgtagcttctctgtagacccagggggttaaggtaggacggaagacaccttaggacagacagctcatgtttggaaatgggactgaaaaggtaatttgggcccagatatcagggagtgtggagagttattaaaaggtttgaagtgaggtggtaataatcaagcttgtgttataaaatgagagactccaggatgggttggactgggtagagaaagaagaggcaaagaccagttaggccgttatcctgcccagatgagagtcgatgagggcattgggtatggcagttggaatgaagaaagataacctaaaatgtagaatgggtgacatttagtgccccattcagtatggagtgggaaggacagggaagaattgaagttgaagtaggcatgacctggacaattagcttaaatcgagaatgaaagggaaagaccaagtggtggggtgtattagtctgttttcatgctgctaataaagacatacccaagactgggtaatttataaagaaaaagaggtttatggattcacagtttcatgtggcttgtgaggcctcacaatcatgatggaaggccaaggaggagcaaaggcacatctaacgtggcggctggcaagagatcatgcagaggaactgccgtttataaaaccatcagatctcatgagatgtattcactatcaccagaacagcatgggaaaaccctgcccctgtgattgaattacctcccactgggaccctcccatgacacgtggggattatgggagcyacaattcctggtgagatttgggtgaggacacaactaaaccatatcatggaggaagggggaagaagctactgagtttggtttctgaaagcaggtctagagctcaggaaagatgttagtctgggagaaatgagcacataggagcaagttgaggccataggagtggatgagcttgatcagaagtagtgtgtagtggctgggtgtggtgactcatgcatgtaatcccagcactttgggaggctgaggtgagtggatcacttgaggtcaggagctggagaccagcttggtcaacatggtgaaaccccgtctctactaaaaatacaaaaattagccaagtgtagtggtgtgtgcctgtaatcctagctactcgggaggctgaggcaggagaattgcttgaaccaggaggtggaggtggcagtgagctgagatcgcaccactgcactccagcctgggcgacagagcgagactctgtagtagtgtgtagaaagagaggggaagagaatagaggactgaagactggagagcaagagctttaagaatrggtagggtaaaggggggccagcaaagaaaatagaagactcaggaggacccgtgtcatcaaagccaagggaggagagagggtttkgaaaagaagtacaacagtggtttcaacagttcagatggtagaggaaggtcaaataaggtaatggctgaggagagacccatggatttggcggttggtaggtcattgcaacttggtttggtagagacaagtacactccttgggccctgggagagcccagattcacagagactagctaagggtytttcactggaattcaaacttgaggtgatgaacttgaactgaagaggaaggcatttgagagggagatttctctgaaactaggcaaggccagatgctgccctctctgtcttgccttgaagatgactagggtaggtctagaaggaggttggcctagatcttctgaaatcaatcccttccataatgagccacaaactgcctttgagttttacttttccaattagattccaagttaagtcaagataagtgaacaggttataccacaaaacatggtgataaatccttttctccctaactgacagtttttcctgctgcawgaatagagaactacgttggggcaataagttggaggagacacaagttttcctgtacgagagacttttttgtttgtttttcctagatgggaaaggcagcttgctggtcagatgaagtgtccacatggtatagtggagcctagacttgaacccagattttctgataccagcctagatttttttttagaataggttgtgactgtaagctttctttgrgaatagcccagtgcctctttgctttcttcacttaagcttttatttcagtttcttcacttcagcttttttagtgtctggtccatggaataagtaaggctttgaaaaatggcagatcttcaagagagatgaagtgcttgctcagctccactcagtgttgttgtcattcatcctctaactgctttaaagtggacagaatatataagctggcctcctgtgtaggcggatgtgtgtgtctgtgtgcgttcatgcctcactgcacccattcatgttttatagtcatcagccctgctttgctcatttcactttgagccttttccagcagccaaaaggctaatttctctcaataaacagtcattcagtgagtagtgagaaacttgtatatgtgaaatgccatgatgaacactttgggaaatgtaacataaagaagccctcaaaggttttacaacttagtgtggaaggtgaactacctggggacataactatgagggaaggcagtgtaaggtaaatgccatgtaattgatttaaataatgggcttcgggaaggttgagtgaaatcatttctggcagagatgatagattcaagggggaggtggattcaagggttgtaaagaaggagtagggtttgggtaggtggaagaaggggtgggcatttctgatgaagaggaaggtgtgggccaaggcataaggaaggaaagtgccacgtctgtggagacagcagtaagcagccttgtctggctaaggttaggactggtaagatgaacctggaaaggagaagggtacattgggcaggctaaggttaggactggtaagatgaacctggaaaggagaagggtacattgggcaggctaaggttaggactggtaagataaacctggaaaggagaagggtacattgggcaggccatggtgtggttttaaatacaggctaaggaatttgtaatttatttgataggcaaagagcactagtggannnnnnnnnnnnnnnnnnnngtggaaggtgaactacctggggacataactatgagggaaggcagtgtaaggtaaatgccatgtaattgatttaaataatgggcttcgggaaggttgagtgaaatcatttctggcagagatgatagattcaagggggaggtggattcaagggttgtaaagaaggagtagggtttgggtaggtggaagaaggggtgggcatttctgatgaagaggaaggtgtgggccaaggcataaggaaggaaagtgccacgtctgtggagacagcagtaagcagccttgtctggctaaggttaggactggtaagatgaacctggaaaggagaagggtacattgggcaggccatggtgtggttttaaatacaggctaaggaatttgtaatttatttgataggcaaagagcactagtggagattttccagcaggatgataaaaatatcaaagtgtacttttggcagggttaatctagcagtgatggaatggaagccatctcagtcatctaggtctaaaactaggctgccagagagaatgggtgagaaggtaaggattcaagagtctacgaacgacagatacacttatttttaaaccagaaacccacttctgggaatctttcctaaatacacactgataacatggacaagattattctttgcagcatcattcatgataggaaaagattggaaacaagcaagtatccatcaataggaaactagtacatacacacagtgggatatatggagttttaaaaagaacatgaggaatctctatatccttctagggaaagatctctttagggaaaagagaatgcacaatgcagtatggtgtttataatacgcctctttttgtgtaagagggagtaagaaatgagaatgtaggcttatttttatataaaaaacaccaaagggtacacaagaatgaaacaaaaaaagttacttagagggtggttggggacaaagggaacaagattggaagtgagacctctcagtgtttactttttcttataatttttaacttttcaacgatagaaatgtgttacctattcaaaaatgattattaaaagacagagaccattaagaaggagtaggcaggacatggtgttcgatttggggttgagtgacagtgaggcccaaagatgaccatgatgttttgggcccctgaaattgccattttcagagagaagtaggtcagaaaggaagtggactgggagaggaatgctgagtccagtttttgatgtatagattttgaattgcaatagagaatccacaagttgagaatcgstaatctgaaaatctgaaatccaaaatgttccaaaatctaaaactttttgaatgctgatgtgacgcttaaaggaaatgctcactggaacattttggatttcagattttcagatttcagagatgttcaactggttatctgcaaataatccaaaaacctccccccatccagaacaaaatctgaaatctgaaacacttctggtcccaagcattttggataagggatactcaacctgtaatacattttcacttgtgctggaaatttgggaccagaacttgggaggagagaaggaaaggcataagcatggaggaatgtttgagaccagaactaaagaggggaaatggtaaattataagcatggaagccaaggttgaagtaataggagttgataaaacttccaagagggaaagagagaagtggaagaaacagaaagatttggaaaatggacacattaatggtagagaacaaaggaccttgataaagagttagcaaagaatcaattacagaaggtttataaaggagaagcaggttggtgcagtgccttgggagccaaacaggtaagggtatctgatgctgcagtgaaatgcggactgaaaaactgcagttggattcatttattaggatgtttttgaggggacctcagaagaacagtttccccatagtggttggaggagaagccagatcccagggatgaagggaagcaatagggaccggaggctagtgaagatgattttacaagagaaggagatgcaggaagattttaggcaaagaggaaggagccagttagaagagagggtttaaagatgtttttaatggagtaattgatggaatgggattcacaagagaatgtgaggcttttgcaaagcagagtgtataaaagttggttcgcttgttaaacagaacaagtgacactagaagtggacctctatggcccactgccctggtgatgatcctaatgagcctagtgatccagcagctgagaaagggcagtcggagatcaccatggtagtttggtaactagtggtgaactgttttcaagtgttcaggaaggaaaatatggtaacgtggacaagcagttttctgaaattctgcttattaatgaaacagtactttagtcagcctattattactgggaatcttccaggtactggggctctgttacaaatgttgcaaaatccagaaaaagaagcctaagtcatgctttctttgtctagttggttaaaacaaagacacaaaaactggtacagaaacaacagggaatgataaaaaccgggtaatctgacccacaagaagcctgatacctacctgaagtgagtctgcatttgagaatgcaagccttttacaaagattctgtaaacagtgctatgaaaaatgttgaaaataagtacaaatatagtaaattactcaataagagaaatggaccttggtaataataataataatggctaatatatcttcaaactcacttcattcaggtactatttaatcctttttttatattaaattaatccttgcgacaactctacaggatatattttcattaccattttgtaggtgaataaacaggcacagataaagtaactttttcaagtcataaggatgttcaagtcataatgactaaacaaggatttatacctggaaagtctggctctagaccctgctcttttaattaccgtgccacagtaactgcttaaatatagatgctgatcaaaggtgactgctttctggtgacaataacaacctccaaagattgggtagctctgagcagattttctctggcctgagtcagtgtagcagaatcgatgatagaatcccaacccaaactaaagcaaaatgattgatatgtttgttggacaatctttggactcattttgccatctcatcaatatttccttgtaatttctgaatcttgggctccagaagcaggccttgctgcccctctgccttgtaccttgaaaactgctgcactgtcagtgcaggtagaagggtggtatccttggcttgggagggcagatacagaaaagtaacttgatctatgaagcatccttcatagatatatacaataataaatcttatatacagagagtttttacatgaaagaggacgtacttagacttagtaaatgtaaattcatttcaaagtgttgctgatactgaattcatagtacttttgtcattatgaattttttcaagtagtatgtgctatgaaaataattatcacaagtggaggaagccttgtggtttttttaaaatataaaaagagctctttcatacttgaaaaggttggaaaacatttgtctaggccagtggtctccaaactcaagagacagctcccttatcactaaaagaaacttaagcaaacaatcaattactttttatacatgtattttaaatagattgtgtacaacagtattgatgtgttatgtaatattataaatagtaataaaaatagaaaaaggcttcagataaaaaaaaaatagagaagttttgatttccccctcacactcttacggcatcttgcatacctgtagagttcatgcactccactttggagatcagagaggattctgggaaggtgaaagaagttttttccctttagggcttaaaatataataaattgttttaaatcaagatccttgttcagtttgcttaagccccttgtggctcagcttttccatcagaaggcccacaatgtggggcctagtcgtgtgaaagcaaggaactctatgattgattagctgctgagcagagaggaaaagtattcctcctgggaattgcacaaccagcatgggatattttgcagggagggtgcaggctttcaaaagcctcagggactgcctcagaacaactttcttgagtggtagttgttttatttgacattcacaagcccagaaggagtgtccrctcatttggggtggtttttagtagctcctgcagtttcacctttcttcttcctaaggacccagggaactgtctgaatttggtttttatagtccttaatgacacactcctaacrgcccacctacttgtggaaaatgacctgcttgatcaaaacactttctcagttttctactttgttttcttggtytaaagtagccatctcggcttccagtatccgaagcagagttttctgtgacctaactagtgatgctgccttcttcctccagacctgtgaagactccctgttacataacagatctaattccccctcctcatctgggcatctgctatggttcgagcatgtccactccaaagttcaggtgttgccactgtgatagcatcaagaggtggggcctttcagaggtgattaggctatgagggcccctccctcatgaatgggattaaggccgttataaaagaggctttttgtggtgtttggttctttttctcttccrtttttcatcatatgtggatgcagcaagaggtccctcacaagaagctggcgtcttcatcttagacttttcakcctccagaactgtgagaaatttctgttctttataaattacctggtctcaggtattttatacctgacatacaaattaagacatcatccaagattttttacatattcaatgcatagcttatacgtttttcttttttttcttttcttttcttttcttcttcttyttttttttttttttttttgagacggaatctcactctgttgtccaggctggagtgcagtagcgtgatctcggctcactgcaagctctgccacccaggttcatgccattttcctgcctcaacctccagagtagctgggactacaggcgcccgccaccacgcctggctaattttttgtatttttttttagtagagacagggtttcactgtgttagccaggatggtcttgatctcctgacctcgtgatccgcccgcctcggcctcccaaagtgctgggattacaggcgtgagccactgtgcccgggctgcttatacgtttttcaattcagagtttcccttcagtcatctttctaccttccctaaccatcctgtatccacccaanctcatcccccagtgcagcacacatacatacacacacttgcttgttctgtcttcaaggcctcaagctatttaatccaaggggaaatccctccttgtatcagtsaaaatcctatycactcttgaaaaacaagatgagtcctacttcttcgataaagattttactaactatgtatttctccaagtgtggtcctcngacaaccttgcattattaccaagattagttcttacaaatgggaatccttggttaccacctgaaacatggttgcttgttttaaatgtgtattcttggttcttatyccagaacttgtgagctgtaactactggaagtgtgggacaggaatctgcattttaatagggtgcttataatgcacagtgcaatttgaaggccacycttaacttaggacacagccctctccagagtccatttttctctttagttgaaacctatggaacagatatttctgagtattctgcagagacttcttgtctctggatcacttttatttatttttatttttgcagtttttaatgaaaggtgtatatagggatactttccccctacatcttctcgaatgtttcttcctcatatctactatttttctttcctactaggtgagatttggctttctgctcaaggatctttttctgttcttttccagttttagcctagtgatagctgccttgttggggtcaatgcccacatggatagttgtgccgttagccttttcccactgcaccctgtcagtatagatgcccttttttttttgaaacagtctcactctgtcgccaggctggagtgcagtggtgcgatctcagctcactgcagcctctgcctcccaggttcaagtgattcccctgcctcagcctctctagtagctgggacttcaggtgcacaccaccatgcccaactaatttttgtatttttagtagagatggggtttcaccatgttggccagggtagtctcaatctcctgaccttgtgattcgcccaccttggcctcccaaagtgctgggattacaggcgtgagccaccrcgcccagccagatgstgtatttcttctggtaaacctggattactttgccagtttgctgacctttatagtgtccttgcacaatctgaacttcatcatcctatttggggggcatggatcaagcattgtacttttgtctcagctctttggaaagagggaagacataatcttgtgaatttggaaaggtgcatttgaaatgcttttttatggttcttgctttggtcagaagtcacaaaagaactgaactttattttgacsactgctgcttatataatggttgcaaaagggagaagggacctgggtcacctttagaactctcccagggaagaccatgttccctttcattgctataactcattcaggaggtgcacttagaacacatgagggctgcaggtatcaaagacaaacttttaaatttatccttattgccattgacttgcacccattctgtgaaactaggcttcaggagccaaaggcagcttgctgagtaggactggggctggtggtgtgaagtgaggattaggggcacagtggcctacttggcaggggtgaatgtgtttaccagcccctaggtacctgcagagagagggctgaaagtgaaccctacctgttgttttcagtcttcccaagtctacctctgttgactggacaaatagcagcttgagtaagtgcccaggaacaccagcaaaaaacaaggggacaaatgagatgtggctggaaagggggatgccctttcacccttcatgcaatgcatatttgaggggaayctggtgctaaatcattagataacctgcttctgggttagggttttgtatgtagcagagcagctccctcactgcagtctatggaaagtcagccctggacacaggtttgtatttttaaatctttaaaaagaaaagaaaagaaaaamcaaggggaaaaaccccaccagttctgtctagctggggtctggccttgcctttgtcttcttagtttggggcctccctgcatttagcaattgcwttctttttatgtgtgttgtgtgaccagttagtatcaccagattcatcttagattgaaaaaaaaaatccccagatggaagtaattgcattcataagcccttgtatttatagaatgccttttccagaacactcaatgcacagcattctatggcataacctactttggtcctggactatctctgtgtgtttggtaagggtcagcttctataattattattgttgttcaacagttggaggatgragaagcgttgtgggttgaaaaggtcacatggcattagtagtagaatcaggaataggatactcaccttccattcctgtctctgtcttgagttccaaactgaggtacgaaggctaatgttgagagggctgaataagaaccacttgtggtgcagattaaaattagagattcctggaccccaattctctagagattccccactcagtaggtcttgagtggggcccaggaacctgtattctttacaagcatttccaataattctgattcacagccagatttaggaaccaatgctatagaccatacgacaactgcactgcccactttatcccctcccaggaatgtttttgacwgaagcatgcctttttaatgtctgtcttcttgctcctcaccctctaactcccccaggcctcccagttcaggccaagaaacatgctacwtcagccaagaatacactgttgacctggaaggcaaataygacctcarataaggagaaagaggaaatcctggaagctctggtcaagctgtactacactctgggcgtggcctggctcctgcagaaccgatatccttccattcctagctgcgtttagtgttcggggccacaggccacacatgccagatgngtcatctcatacaggagggtgggagatggaaccaaggccttgtagatctgttccaacatcaaggccctccatgagcctctcctctccatctagaagggtgtgtattctcttcctatgtctattcatataagctctgagttgagccacggaagagatttcactagtcacatattacctagccagctgaaggttttctgagtctgttctgctcttcattgagcacccaagaaaatcagtgttagcaatgaggatgagggtggtggtggtggtggtggtgtagtgatggagagaatgggtgataatttaaagcacaatttggcaaactaggctgcacattgtaatcccctggggagctttaagaatttctgctgtctgttcctgccccaaagattttgactgagaggctctgaggtacatctgttcattgaaatttttaaaagccctccagagattgtaatttgcagcccaaaaccactgatttaactgattctcgatcattttagttttttgaaatgctcttgtggatactgcccatgaggctggaggccaagcaaaatagacaaaacaagtagttctataaatccccagaggggtactgttatatgtgcctttcctcagaactggggattctgacagcctgttgtaccatctccactggaaagatgttaagggcatttgatgttcacgcatcatcatgagcactctttgagccyatgtgtccccagtctcctctctacacatccccctctctacttttttggtcctaatgttcaacttgcaaaatctgatatgtggccttcctctgttatacccttagcagggggctattgaaaatgtgggaaatagaagaatgtttgggaattaangggatttttgcttttctgctgtttgcctttggcccaaaacctgctttgcttggactttctaaatgacccagaaagttcctttcagcgtaattagttcctctcttttaccattcacaggaacaggcttgggaaaaatgaataactattgtcatgcagtagatgcctctaaaggaaatcgagtgtaatttacagtttccgctcactcctgcaaacactgcctacctactctagtcttggattcaggcaaccaccacaggaaacccaagcccctgttccttttytaaagaattcttgcttcttgacaacataatacatggaaaataaagaacatagttaagtacccatttttaatattgcttcacttttccaagagccccttttgtttccttatcacctgctgtccctgtgcagtggatgttagtttgagtgcttgccattttccttgactatttcactggcagagaagcctatttcaacctgcagaaggcagagagaaacatgaaggagctgaaagaattatataaaggaggtgtttgtgaattacaagtctctgagaacgacctaacacttgctttgggcaggtaagatctgggcttggagaagctgaggcttttatgaatgaggcttggaattacrtgatataagggagaaaaatatttagagcaaaaaaacccagaaactcaaatgataataaaagaggctcatatttaccaaatggatacactgggcattttgtgtactgccccatttaatcctcacaacagccattgaggtagttggtatgattattattttattaaaggggggtggtcaaggagactgaagctgaggttaaacaaattgtccaagataacatagcttgtaaatattggatctgtgatctgaactcactaactcttagtcttccttatacttgcctctcacactcactctaatattgtatttttctctgaattgccacctatttttgtcatgacatgtgacattttagatgaaggaacacttaatgaagacaattaactggaagctgtgaaagccatgcacagcatgtacatttttaaggaaagttctgttccatatgaaaacaaagttcatggaattggtttaagccagaacaagatttaactgtcttgctgttgacttagggatcctctgagaatcagaatatttagaaatgaatgtgggcccatcagattattagaagaaaaagaataaagagtttactgttccctagatttttcaaatatctttacatccttgaaagcaatctgtttccaaaactgtaagcacttggcacagtagggtatatgactgaatagtaagtaaatgaaatacatgcgtcatgtctgcgtcctctaaacaaccatgaatctagaagtcagatgggaaatggggagatgttggaatgtccagaactaaatcaaactattgacttaagtccrcagggcaataaattacagtctggtgaatgtctactcctgtcacatagggcctaaagtttttctgccttatgtgaaagatagtcttattcttttttcagaaaaactctggtgctcattttgttcatccattctccagtatttattgaataccttttttatgcatgtcctgttctaagtgttagagtgcctactaagtataactacatactagacactgttctaagtgctttacataatttattttacttagtccacatgacagccaatgagggtaggtatttctattattttcatttagatagtttttcattctgccactcaggctggagtgcagggtgcaatcagaactcactgaaaccttgaactcctgggctcagcctcctcagtagctgagaccacaggcaagacaccaccacacctggcttacacatatatttttaattcaacttaggaatacaaatattggagtcaggaggaaggaatattgattgtatatctactatatgttaggtgattttatacttaatattattcttcacaacaaacttgcagtataaactcaattgttttatttagaaggaaatgtaggcttatagagtttgagaaagctcataattaccagaaccagctttgaactacccatgatctcattttaccttgctgtctctggaaagataaacctcaatgagatattgttttatcctcatttaaaaaaattatattcccaactttgttgtggaaaattttgaaaatacagacaggtatgaagaacgaataagccgattgtgataccaccacacagacgtaactgctatgaacattttgaacagatatatatggatatcaataactatatctctatgtggatcacagtctaagtgcagctttatatctttttccttttagcacatttttaatatcttcccatatctgtctaaaaagaaaacatgacttttaatgtctctaaggtattttattgtatgatatgctataatttatttaatcactctcttgggggaatatttacatttttttttctatcctcatttttaactgaggaggaattcgccaaattaaatggaacaaaacaaagcaaaaactttctttggcctgaaagagagggaatcagaggtaataaaattttattttgattttagaaagtctatgtttatgggtgaattatcccatcttgtgaattcctggaagccatttttccatttgctttttaaaaaaaattagacaacagcacgacatagtaatgggtttaatgagtggtcgtcaatgaaatctgatgggtaaaatgcaggataattggagtttatttacagcaaggctagatttttgagccagctaccaagatgatgggcctgtgaaggccaaattctttaattcttggaatcagttccttttgtgtctgcaaagtaagtggcctctctgtgactttctattttcatcccttttcttgcagagcctccttggccatccacagactgaacctagctctggcatactttgaaaaggcaattggcgatgttattgctgccaasggtgataggacgtcagatctgatcagcctgtacgaggaagctgctcagatagagcagctgaggaggaaccacaaccaggccatccagtacttgcagcaggtcagtgggttggccagagcccaggctgggttgccttgtttggccccaggcttggttctcagggccagggaagcatgggcttctcagaagaacaagggctggaattgattctgttttaaccctgacttycctccagatccacctaagagcccttgatcaaaccttaaatgaccaggccagagaacactgactcaggtgggcgaatgtgctgtgtcattggctgtgcagacagcacttccccctccccctcttatctctgttggtgctgtaaaaaagaagcaaaatgtgagtctactccaaggaaaaaagatacagggacaaccgaacttaaatcttcagcaaaaacaaaaggcctttttaaatgaaaaatcatggtattttagggtaatgctgtcatttgtactttaaactagtctagctgattatatttccaaacctaaggttaaactaacaaaagggtgtttcacttggaggtaactaacttgacaaatgcccgggggaaaacaaaacaaaacataggaaggaatggtgagtctattatattagggtacttttatgtatcatgtacttgaagctgctaaattcaccttttctctctccgaaggagaatgctgcctgtggcttcaggtatctcccacagtgacaaacatcaaaatactggatatcctgtatcatagaaaaggtgcaatgcaatctaacagtatacatgaaaacagactctgaagaaaaggcattgcaaacaatctgacagtccacaattataaacatcacacagtggagagatgtcagagaatgctgctgtgaaggcagggagtccactgcttacagagaaagccagtctggtttttgtgttcaagactttctcaaagcagtggtcagatcagaatgaataaaacaataaatagcagtgtttcccaaaagcaccaaaagataagagttaaaatgtatggaatgctttttctacgttccctagaggatatatcgattcatttaatctgtacaatagctctatgaagtaggtaccattattattttatctcattttaaggatgagaaaactgacgcacagagttatagctaactcagctgacattgtatagctaagaaatagtaaagcagggatttgaactccacatctgaccctacagcctgtattcataacaactctgctctgtgtcttggctccaaagtcttctctgataacccctcagctctttgaaacacctcacagtatttggcctatgaaatattaagcacaggtggttcttttgtggctggtgggtgtggactcaatgtttttctctttctcttttctaagtgttactccttccattttagcacaaataatataaaatctaacacttttttagtgcttactatatgctgggtggtgttctaaccactttacatatattaaccattaatttatttaatatttacaacaactttttataacaaatactattcttattatccctgatttacatttacaagactgccttcaagamtggagttcagtccagtgagactgagctaaggttatgactttatttttgctatgaaatctaataaaaattatactagccaacatttattgagaacttaccacgtgatgagyaccgtgccctgtgctttgcatataccatctcacttaatccttcccaaaccctaatcagtgggaattatatattccttctacgaatgaaggtgaaattacttgcacaagactcatagctaggaagtggcagagctgggactcaaactcacctctcatctaaatccacagtgaacactgtcaytgggtgcttaccttgtcatgattttctttattccaggctcattctgtctgtgtttctttgttcactgaagtcagccccaaaactgcagaaatgagtgcgttactggccaaagcttatgccatgtctggagaggcccagcacaggggtaggtaaaagaggtagccttgaagttatttcccagtcacatgagggaagcacattggcaaacagcctatctaagattctaattagctatttattcctgtaatggaaaaattaggtgggtcacagtctcatacaaaatcaattacacattaatttaaacctgataatatacccccacattcgttggaatgtcagtaacaaataaatcatctgatttctacatcctctatttattttgaatctcagtgagattcaccttcttaactaatagatatcacacatactgtgaatgtggcctgtgcagtatcggttgataaggacatccagtgataaatgggtagagctttacctcctccactttcagtctccttgactcttttcctctggctgacaagagagaatgtttgttagcagaattttcttgacccatattcaatagttagatactgggggttgcagagaaagccaactgattaatttatgcttcaacaatagttctttgtctggcaaggtcatctttttgaaagtgggtggctttgggagagacacaaatgaaccaatgagggaggacaatgtatcattctgtgctggcttgatcagattaatggacactgatggattcagtggcctgtcaggaggaatttaggcttcatgaagaatataatttgatcattttaaaactgtctattttctttgcttataaaagtaacctttttgtgtatgttattttccagttagagagagggacagaattatagagaaagctttccatcctacttttttcaatgcttgtattccccatgtcattaaataaacattttttttcagtttgcaaaagttttgatcttttaattattttttaagcataaacatccattgaagacttcctgattctttgtttttcagctaatcctctttctccttttaagatttcctcgtctatattcacagtatatattctccatacaacttgagctttttaagagtagtctttgtggttacaagaaatttagtctgtaaatatgtacaaattttagcttttttttaagtgagaaaaaacaagcgtttatgtttatagagttgagagatttcaaggccacctcattattttcttatatactaatttttaactttaaaaatatagatttttatattatatcattcactaaattccaggtggattaacattttatgcaccaaaactaaaaaagtaaattaatgagaagaaaatacagtactggaaaacaaatactaaaattaaaaattggaggaaagaatttttctaagcacacaaagacataccataaaagaagagtttgatagatttcattacaaaaaggtctaaagtttctatctgtcacaaagtaccataaataaaagtgaaaacagtgtagtcaagatgaacagataacctgaatagacccataactatttctttttaataaatttgtagtttatcttttaagaaagaaatctccaggcccagatgatttcaccggggaattctgtctagcatctaaagaaggaatagcaccaattctacataatctgtctcagaaaacagaagaggagaaaacactttctatgaggccagtattaccctgatatcaaaactgggcaaagacattacaagaaaaaagatgactacagttcaagacctttcatgtgtgtagatgaaaaaagcaacaaaatatatagcaatatataaataacataccatgatcaagtgagatccagtgtgtttagggtggtatggtcacagacctccgtgatcaagtgaagttttttcttaaggatgtcacactggtttaatattcaaatctcagtcagtttacctctaccatattaacagtccagtcatggaaagctcatgattttatcagttgttgcagaaaaagcatgtgacaatattcgacatccattcatgatggaaggaacttctttaatctgataaaaggcatataccaaaaaccctgcagctgatttcatgcttagtggtgaaagactgagtaccccttaagatcaagaacaaggcaaggatgtkcactctcactgctcctattcagcagagtactagaagtccagcaaatgcaagaaggcaagaaaaataaaatggtccctatttgcagtcaaaatgattgtctctgtagaaaatgacaaataatctacaaaaatcctagaactaatatgtttaagtgtagcaaggtcacaggatacaaggtcaatgcacaaaacttaattgtagttctatatagtagcaatgaacaactggaaacaaarattwaaaaaaaatcacaatagccccatccctgcaaatgaaatatttaggtataaatctatcaaaatatgtacagtatttatgtgctgaaaactacaaaactgatgaaagaaattaaatatgacctaaataaatacacatactatgtatggattggaagacaatatagtaaagatatcagtcttccaagattgatctgcagatttaacataattataatcaaaatcccaacagaagcatttgtaaatatagacaagctgactaacatttgtgtgaaaaagcaaagaaattaggatagctaaaatggttttggaaaagcatacagttggaggaatcatagtacttgattttaagatttactataaagcagtaatcaagagaatgtggtatattggtggagggacagatactaataacatatctctctataatcagacaccaataatatctctaacagagatagagttattggaacacaatgtagtacagaaatagacctgtataattatggccaattaatttttgataaatgtgcaraagtaattcaatatggaaaggatagtctttaaaacaaatgatactgcaacaactggataccacatgccaaaaaaaaattggactcttactcatgccatacacagacattaataatggacattgtcctaactgtaagagctaaaatttatatttacatagaaaaaaataggctttaaaaaagtaccaaggcctggatacaaactaaatacagaggccaaggtgagaagatcacttgaagccaggaattttatactggcttgggcaacatagtgagaccccatctctaccacaaaaaaaaaaaaraagaagaagaagctgggtgtggtagcatgtgcctatagtcctagctactcaggaggctgaaataggaggattgcttgagttaagggttccagtctacagagagctataagcgtgccactgcactctagcctgggtaacacagtaagaccctgtctctaaaaataataagaccmaaattcatgtggaaaataagtttaaatcatactagtaattacaaaaataaaagcaaagttactctttttgtctaacaaattgtcaaaattttaaaaaatgataacaccaggattgatgagatttgataaaaactctggagagcaatttggcaggatgtcacacattttaaaatggtatgtatctttaaaaatgcaagatcaaaatttcacccatcctatgtgaaaattttaaaaatttaaaaatatatagcagttggcaaattcataactagtaggagtgagtgtaaattgatattaaatttggagtctaatttgataatatctagtaaaatttaaaaggaaacatgaataaagatgttcactgtgtcactgattataattgtaaaaaataacccaaatatatatatcaataagtaaaaggaaactttggtgtattcactacatggaattttgtagctgttaaaagaaccggacttgggctgggcggagtggctcacgcctgtaatcccagcactttgagaggccgaggcaggtattttgcctgaggtcaggagtttgagaccagcctggccaacatggtgaaaccgcgtttctactaaaaatacaaaaattagccgggcttggtggcatgcgcctgtaatcccagctactcaggaggctgagacaggagacttgcttgagcccaggaggcggaagttgcaatgagccgagatcgcgccattgcactccagcttgggtgacagagggagactccgtctcaagaaaagaaaagaaaaaaaaaaaaggaccggactatatctgtagatatcaaggttaattttttaaaagtattaaggaaaaacagttgcatttttaggacatacaaaataatactattgtttatagttacatttaggtaaacattaaactacaaagtaagatttcattaaaatgtaaacagaatatgactttgtgaagagatctgtaaatcatatccacacatacatgcagtcacacaaactgtataaaatggtcataactatttgatagtgctggaagtagataaaaagaacaaattgcaaagcatttattttgaaaaaactgctggagctttgagtaaagagaaaatcagtggccctcctgcctggggctgcttccatccagtgccccaggtcggtccatgagaattgcaatgttatcaccacgggccgcacaggagaaccggcagctttgctggcattggaggcagacttaatatgatgaaagggataaaaacacacaggtttatcagataaagggggcaaactctggaggaaatgaaaagaggatcgcctgcatgttgacactagcctgaagttgctgttctggttggtgtgagtggcatcagaaattttaatggggagaccacagaagggctaaatgagctctccccacatccctggatacccacaaaactacatacatgtgtaggggatacttgaaagcctaataaagagtaacaaccaaagaagacttgaaatgtgtgagagcttggaatgcatttttgtctacatacagagcagttgacaggatgggcgacgtataggctgaaggtatttaagcacaacctctgcccaaatcagtaggtcaacactaagctatgcagacacaggagtgaaccccagaaatccagattaaaaataataagcactaaaatctgagcagaaacttctggtttctggtctggtatataaggagtttggaagtcatcactttatccaaacaacaagtaaaaagcaaaatgaaatattaactcctcttagatctgtcacagagaactaaggtcacatggcaaaccagtgccccacaaattggagagacagcaaaataaagagaatcacaatgtaccaaagtagaaatctatctccacaggaaccagtaccacagacttgacgtaaagaaatattaaaagaagttcttcagagaaaaggaaaatgatacagaaattcataggcacataaggaaaggaagctcactggagaagaaatgtgatcataaaataaaaaactcatttttcctattcttaatctaacaaataacagtttgttcaaattaggagcagaaggcagggattaggattattttgttattataaggtactatatagtgttatttgtaagtgaacttggaatgattgtaaatgtatattgaaaactccagggcaactactaaaaagagttttttaaaaaagtgtaactgatatgctaaaaagagaaactggaatatatgaaatgctcaatttaacaacaaaaggagctgggtgcagtggctcatgcctgtaactccagctactcaggaggcagaggtggggggtttgcttgagcccaggagtttgaggctgctgtgagttatgatcacaccattgtactccagcctacgagacagaatgaaatcttgtctctaaaaaaaaaataaataaataaaatttaaaaagcaaaaccacaaaaggtaggaaaagagtgaaagacaaaaatatgaacaaagaaaaaggaccaacaaatagaaaagtaacaatatggtaaatgttaatccaactatattaacaattattttaaacatcagtggtctaaataagccaatgtaaagaaagattttcagagtgatcaaaaaacaacgcccaaccatatgttgtctacaataaatccactttaaatataaagacacatagattaaaaggaaatggatggagacaaatacactatactaacattaatcaaaagaatgcaagagtagccgtactagtttcagccagaacaaacttagtgcaaggaaagttatcagggacaaagaggggcattacatatgataaaggggtcagttctccaataagacatacaatccttaatgtgtacgtgcctaacaagagtttcaaaatatttgaggcaaaaactgatggaactgtaagaagaaatagatgaattcactatcatagttgtactcttcaacaccccttgtattagtcagggttctctagagggacataactaataggatagatacatatatataaaggggagtttattaaggaatattaaactcacaggatcacaargtcccgcaataggccatcttcaagctgaggagcaaggaagccagtccaagtcccaaagtctgatgtttgggggtaggaagcatccagcacaggagaaaaatgtaggctgggaggctaagccagtctaatcttttcacattctcctgcttgcttttatcctagccacagtggcagctgattagattgtacccacccagattaagggtgggtctgcctctcccagcccactgtctctaatgttaatctcctttggcaacaccctcgcagacacacccaggatcaatactttgcatccttcagtccagtcaagacactcagtattaatcatcacacccrtgtatcagaaatggacagatacacaggcagaaaatcagtaaggacataatcaaattcaacagcaccatcaatcaacttaataaaattgacatctattgactactgtatccaaacaatagcagaatgcacattcttcccaagctcacatggaacattcaccatgatagaccacattcggggccataaaacacaccctaacaaatttaaaagaaaatgtacaatgtctgctctcagaccacagtggaattaaactagaaatcaataacagaaagatacctagaaaatcccaaaatacttggagattaaacaacacatatctaaatgtgtgggataagaagaaatctcaagagaaactttaaaatgttttgaattaagatttttttgaaaatgaaaacaatgtaaaaatttgtgggatgcagcaaaagtagtgcttagagggatatttatagcatattagaaaagagatctaaaatcagtaatctaagtttctatcttaggaagctagaaaaagaagagcaaattaattccaaagtaagaagaaaaaaataataaaaattacagtagaaatcaatgaaattgaaaacagcaagtcaatgaagaaaacaaaaccaaaagctgattctctgaatagattaatgaaattgataaagctctagccaggctaaggaaaaaagacaggacacaaattaccattatgagaaatgaaacaggagacatcactacagatccaatggacattaataggacaataaaggaatattatgaaaaactctaggctcacaaattcaataacctagatgaaataggtcaatctttcatgaaagatacaatctgccaaaactcacataagaaaaactaagccatttgaatagatccatttctattaaagaaattgaatcaataattaataaccatcccatgtgggttcactagtgaattctaccaaacatataacaaattcttgacaatctcttccaaaagatagaagcagagtagccatttttaagtcaatctatgaagccaacattaccctaattccaaaattagacaaagatattaaaagaaaactatagatcagtgagatcacatggacacagggaggggaacatcacacatcagggcctgtcgggggctggggggctgggggagggatagtgtcaggagaaacacctaatgtagacgacgggttgatgggtgcagcaaaccaccaaggcatgtgtatacctagtaacaaacctgcacattctgcacatgtaccccagaacttaaagtataataaaaaaaaattatcaagatttaaaaaaaaacaaaactgcagatcaatacatctcatgaacatagaggcaaaaatccttaacaaaacatcagcaagttgaatccatcaatgtacaaaaagaattatacactacagccaaatgggatttatcgcaggtatgcaaggccagtccagtatttgagactcaatcaatgcatcacaccaacaggctaaagaagaaaaatcacataatcatatcaatagatgcagaaagagcatttgggagaatccaacactcatttatgattaaaaactctcagcaaactaggaatacagggggatttcctcagcctgataagtcacatctacaaaaaacctgcagctaacaccattgttcttttttttttttttttttggttctcctttgactaacactattattcttttttctttctttctttcttttttctttttttgagacagagtttcgcttttgttgctcaggctggagtacaacggtgtgatctcagctcactgcaatctctgccttctgggctcaagtgattctcctgcctcagcctcctgagtagctgggattacaggcacctgccaccatgcctggctaatttttgtatttttagtagagacggggtttcaccatgttggccaggctggtctcgaactcctgacttcaggtgatccacccacctcggcctcccaaagtgctgggataacaggtgtgatccactgtgcccagccaacaccattattcttaatggtgaaaaactagaagcttttctaagactgggaacaagacagtttcctctcaccactccttttcagcatcataatggaagacctagctaatggaataagagaagaaaaggaaataaaaactatactataatatttgtgaaggaagaaatataactttttatttgcagatgacatcgtctgattagaaaatttgaaagaatcaacaaaaatatctggaattaataagtgattatagaaaagattcaggatacaagtttaatatgcagaagtcaatactttcctatataccagcaatgaataagtmaaatttaaaatttaaaacaataccatttacattagcactccaagaaaatttaaaacaataccatttacattagcactccaagaaatgaaataattaggtataaatctagcaaagtatttgtgaaatatatgtgagaaaaacaacaaaactctgatgcaagaaatcaaagaactagccaggtattgtggtgtgttcctgtagtcctagctacttgggaggctgagttaggagaattgcttgagatcaggagtttgagaccagcctgggcaacacagtgagacccatctcaaaaagaaaaaaatagaaatcaaagaactaaaataaactaagatatctttaatatctattccatgttcatggataagaagactcaataaaaaaatataaagttcttccaacttgatttatagattcaactcaattccaataataatctcagcaagttattttttggatattagcaaattgattctgaagtttacatggagaggccagaataaccaacaacatggaagaacaaagttggaggactaacactacccaacttcaagacttactaaaaaaccacagcaatgaagacagtatagatragaaatcatcttactgtagtcacagtggctattatgaaaaagacaaaaaaacaaaaacagatgttggtgagggtgcagagaaaagggaactctcatacactgttggtgtgaatgtaaatcagtacaacctctatggaaaacagtacggagatttctcaaataactaaaaatagaatgaccatttgatccaggaatcccactattaggcatctacccaaaagaaaaggaaggtatatatcaaaaagattcctgcacttgtatgtttatcgtagcactattcacaatagtaaagataacagaatcagtctaagtattcagcagtggatgattggataaagaaaatgtggtacatatacacaatagaatactattcagtcataaaaaagaatgaaatcatgtcttttgcagcaaaatggatggaactgaaagtcattatcttaagtgaaacaagccagacacagaaagtcaagtatcaaggtttcactcataaatgggtgctaacaaatgtgtgcacatgggcttagtgcagtgttagataatggagactcataagggtgtgatgtggggtggatgatgagaaattaatgagtacaatgtatgttatttgggttatggatactctaaaagctgtgactactatgcaatttatacatgtaacagaattgcacttgtactccataagtttacacacaagaaaagtatggtattggcaaaattttcccattgtttctgtgtattttctagattgatataaacgtattatgtttggaaagacacaacattaaaattaaattttcaagccataacaactatatatttaaaatacttataaaatcacaacttactccctcccagcaccccccaaacaggaaccttagtaaacattactatcagagttttatttagctaaaaatatagtcttgcagtatacctgggagtttaatatggtagttatttgtagtattagcataataagattattcagacagaagctttcttttttgctacaaaaaattccatggattttataaggagaataaaaaccaaaacatcatctgatgtcattaaatcacattttagggctcggtgcggtggctcatgcctgtgatcccagcactttgggaggccgaggtgggcggatcacgaggtcaagagattgagaccgtcctggccaacatggtgaaaccccatctctactaaaaatacaaaaattagccgggcatggtggcgcacacgtgtagttccagctactcgggtggctgagacaggagaatcacttgaacccaggaggcagaggttgcagtgagccgaggttgcaccgctgcaccccagcctggcaacagagtgatactctatctcaaaaaacaaaagaaaacaacaacagcaaaaaaaccacacatcttagacttttaaagagtccttatgagacctggcttgagaacaagcatggactttaagcatgaaaatgtcaattgagccaaagctgatattagacatttgtaaaggttagcagcttgccttaaataattgtttcaatttttccagatgctgttgagatatatttcataaraagtatcaatgcatatcgagcaacattgggctcagaggattttgaaacactgagcaccactgaagaattttgcaaatggctyktccaaaatggagaaaaacaggtaaatatgatcaatgcataaacagaattgctagtttgtttattagatcacaakagcatttttcatcttacaattcagatactggagatcagataggtcccagataaaactaggcaagaaycacaytgtttcattctttgctagcattaaccraattatttttttttcagattggtttcattcttttgatgaaactgagcaactctgtccgacaagatttagtttgtacttggaaactgcagagtaggctcaaagtattttagagggactcgatattgatggcaaaagaaaattggcagccatatgtttgcttctaacggttccctctctgacaaactttttttttttttttgagacagggtctctgtcacccaggctgtagtgcagtggggcgatctcggctcactgcaacctccgcctcttgggttcaagagatttgcctgcctcagcctcccaagtagctgggattacaggcatgcgccaccatgcccagctaatttttgtatttttagtagagatggggtttctccatgttgaccagtctggtcttgaactcctgacctcaggtgatccacctgccttggcctcccacagtgctgggattacaggagtgagccactgtgccccaccagcattgcctttcttgtttgaaattttacagctatactttgttgtgtaatgttatggttccctttctgtaaaatgttatttttggtgatctaaataaagcctgtcttgtttggagaaaaaaataagaataaaactaggaataatacacagggcttaggtggcttggaatattagtaaaaaaatatttttcttgtatcttgatacatgagatccttcaaatccagcacacatgatctctggcattgtaaatttaatattttaagtcaaaattggcttccatcttcggatctagctactagttcttttcttttgcagtagtggttttctcttgatctgataggtttttattagccacaatcttgttttcacatttaaaaagttatagagaataattgttattgctgacctttttacttagaagtcccatgagtctaagctatcattcaaaaccttttgacttgaactttatatattcactgcagcatgaacacagtgaagacctttgtctgtcataagatcccacatgactttgatctgaccaagccaactttatacttcctcagaagagtgagaaatatggatagatttgacatggtcttattggccatgtaaaaaccagtttaagagtagagttacaggcacataataagtaaaaatttatttccaggaatgaagaacagttttttttatatcatatctaaacattttttataaatgatgacgttttctttatttcaattttaattgccatttgtaaagacaaaaaccttataatgatttgcaaccttttttctgtggccatgatattttctgttggtttagaagactgttttttttttttttttgagacagagtcactctgttgcccaggctggaatgcagtggcatgatctcagctcactgcaacctctgcctcccaagttcaagcgatttttgtgcctcagcctcccggaacagctgggattacaggcgcccaccactacacccggctaatttttgtagaaacggggtttaatcctgttggtcaggctggtctcgaactcccacctcaagtgaccrcccgcctcggcctcccaaagtgctaagattagaggcgtgagccacagcacccggccggttcagaagattaacatgagatcccaatgccatgggttgatctaataactttcttttcaaagatgtgaaaatacgttaccagaatttaataccttatccttgttatattctggtgcagtgaataccatgaccttggttgtgacaaaccaccagtaccaccaccagtaccaatgcctgataatcctccacttctaaccaagtactttctagtataccaagctcctggacaaagccaccaaaggacctgagtgccaggtggctccaaatctaaaccataagcaggacggactatggacaagtcagctttaccattaggaagcaagtgccatgagggcaggaatttttgtttgttttgttcactgcagtgtcctcactgcctgaaacactaactggcacatagaagatgcctgataacttttgaatgaaactgctgaattttataacacatttcccatatttaaaagtagctcgttctcctgcctccaagcttcatgtgaggctctaggcctgtcctagaggaccataacagaaactcacaagacttgggaattgttcccatggactacacacacacacacacacacacacacacacacacacacacaatatcttttgataagtagtttaatctgccatggataaaaaataaaactcattcatctggaaccaccttcttccagtaattcatcaaaatgacaatcacggctgggtatggagactcacacctgtaatcccagcactttgcgaggccgaggcaggaggattgcttgagcctaggggtttgagaccagcctgggcaacaaagtgagaccctcatctgtaaaaaaattaaagaattagccaggtgcagtggtgcatgcctgtggtcccagctacatgggagactgaggcaggaagatcacttgagcctgggaggttgaggctgcagtgagctgtgatcatgccactgcactccagcttgggtgacagagaccctgtctcaaaaaacaaaccagaaacaaacaaacaaacaaaacagagaaaagaagagaggcaccccttacatgttctctagggcttttagaaaacatgaagatgttcctctggtcacatacatgcaaatctataagaaaggtgatactgtggaaatcaagggaataggcattgtccaaaagggaataccccacaagtgttaccatggcaagactgagagagcctacattgttatccagcaagctgttggtgttgtcaacccaagatttttgacaagattcttgccaacagaataaatatgtgtttggtgcatattcagcactctaagagctgggatggcctcatgaaacttctgaaagaaaatggttagaaaaaaaaggaagtcaaagagatagttccctgggttcaactgaaatgccaacctacttcatccagggaagcacactttgtgagaactaatgggaaagagcctgagctgctggaacctgttccctgaatagctagattcactcaaaggaaaagagagaagactaaaataaataaaatcagaaatgaaagaagagacattaagctgatgccacaacaattaaaaggaatataagagactactatgaataattatatgtcaacaaattggataacctaaaagaaaaggataaaattctagaaacatattacctaccaagactgaatcatgaagaaatagaaaatctaagtagacatttaatcagtaatcaaaaaccttcttacaaataaaagcccaggaccagatggcttcattggtgaattctaccaaacatttaaagaagaattaatattgctaattcttttcaaactcttccattttctggaagaggaggacacactttcaaactctttttatgaggccagcattactctgacatcaaagccataaaaagacactacaagaacactacaggtcaatatccctgaatgcatatagatgcaaaaattctcaacaaaacactagcaaacyaaatttaacagcacattaaaagagtcatgcaccatcaccaagtgggatttatccctgggatgtaagaatggtttggcatacaaaaatcaatcaatgagatacaccaccttaacagaatgaaggataaaagtcagatgatactctgagatgcagaaaaagcattggacaaaattcaataccttttcatgattaaaaagaaaaactgccaacaaagaaggaatagaaggaaattacctcaacataataaaggccatacatatatgcaaagcctacagctaataccatacttaatggtgaaaaactgaaagcttttcctttaagatcaggaacaaaagaaggatgcccacttttgccacctctattcaacatagtactggaagtactagccagagcagttaggcaggaaagataaataaaaaacatccaaatatgaacagaagtagaattatttctgtttgcwgaatgacatgatgttatgtagaaaaccctaatgatcacatacacacacacacacacayacaaacacacacacacaacctgtttgaactaataaactcaactaaattataggaaacaaaatcagcatacaaaaatcagttgtatttttatatgctaacgttgaacaatttgaaaaaaaaagtaagaaaacaatcccatttacaatagcatcaaaaagaataaaatacttaggaataaaccaaggaggtgaaagacttatacactgaaaaaaataaataggaaaataacaaattatatgcatgctttcctactctaaaaaatgcaaaaatattacagtagtagccttgagattcctgatttattggcagtgttctctggaaagcagcaattgacatcccttttatgtttgttgttctgacatgccacattagggatgatgattacatgttcaacccaattatgaagaaatgtctgttacatctgtcaacatagataattcaggcagtgagtgggtgatgtacagttcttgagggagccagcaataatacctcttcaccttccctaaagaaagcacattgggaaggcaaatgagtacaagcacctttgtcctatgaataatttccagtgyatacttaatttatttttgctgtatagtaagtagttaacagtgagagctttgctgaaagacaattagcctagaccttttaaaaatgtcaatgttatgaaagaccaaaagggcaggagaactgtaacagattaaagaatcatgaaaactaaatgcaatacatgatgattagatgctagattttaaggaggtgtaaagaacattactggaacaattgggaaatttgaacatggagcttgtatcaggaaacgctgttgtattgatgtaagatttcttgaatgataatgttattgtagatatgtaggaaaatgttcttgttctaagaagacacatgcttaagtatttagtggtggccatatgcgatggctcatgcctgtctgtaattccagtaatttgggaggccaaggcaggaggatcacttgagcccaggagttcatgaccaacctgggaaacatagtgggaccccatttctacaataaataaataaataaataagctgagcagagtagtgcacaactatagtcccagctactttagaggctgacgtagaggatcatttgagcctgggaggtcaaggctacatgagccctgatcacacccctgcacgccagcctgagcaacagagtgaggccctgtctaaaaaaaaaagaaagaaaccatttaggagtaaagtatcttgattacctacaacttattttcaacaaaaatatgtgtgtgtatgcatgtatatttatatatagagagagacattactttttaagaagagaaaaataaagcaaacgtggcaaaattgtagcaatgtgtgaatctaggcgaaaattgtatgggtatttattttactattcttttagcttttctgaaggtttgaaaaaaattaaaataaaaaataggtgaacaaaaagagtgagggctgtggaattcagactgcctggtgttggaattctgacactgctaatcataggctctatgatctggggcaagatccttagctgttattagtttccattccttcatctgtaaaatgagtataataacagttcctctcttgtagggcagccatgaagattaaatagtattatatgaattaactattattaattacaagcttggaactttaattcttaatacaaattacttaggtgacacatcacaacggactgatcctggtgggttatgtcattgttgggtacaatgccttctccatagagctcagggaacagaaccagcatgctccttcggaattgccaggctgatttaaaaaaaaaaaaaaaaaaaacgttttatccctcaggaggcttacagactgctaaaggcttcattaaagtcccaggtattcagctacagtgactatagcaaaaatgtggctgaaacttttcataatacgggcaggatctgctttgccaaaggagagcccagaaaggcaattcagctgctgaggaaggcgacttttggctggtttcgttacaktttcccctgggcttgtaagcaggatgtgaggagggatgtatgtacatatgtatgcatgtatatatgtattttcccttcccttccatttcattccatctctccttttctctttttaagtgatgtgttatcttttgaaaattgtctgctttgttagatatgctgagggagaatatgatacaaaaactttagttgagtccctatctggacaagggtcttaaaagagtaacaccctaatcttgaaatccaagtatgatagtggcagcatctcttgaaagcacttcaaggttgagtggaattagtaataccttgtttaaccatccatacccaagtactcatttcccttccagagagctcattcccttgcagtggggtgtggcaagaggtgttcaaccagtcagtgtactgacagaatgaatctaaaggcttagtaaaataggtggggatgtctctacataaaacctaagtttattcaaagtcagaggaaaagttggtaaagatcaagtaatactcaaatgagcagagggtggagtcagaagcagtctacatcaggttcgcagggagtttcatctgatttcagggtaacctaatgtgatcagaaaatagtaaataacagaagaaagaggaactcattttgaagattcagagaaaaagccccctgaatgtaagttataggagccagaatagcttttccagggaagcatgaacacgcggatgacatctgggtaatgggggcagaagcctgaaaggagagaaaactttgaaatgaaaagatgacaatctgaggataagaaatgagatgaaatggaaaatgatgagtgaaatgagcaggggttccagggaaacaagtctaataaaattcaaatccacactgaaaataatgaagactcttaacatggagtgatactggagtattgtttctcaaatctagaattgcaacacagtaggaaacaaaacaaaacaagcaaaaaacaaattcctgagtctcaccccagaccatctgaattagaagttttaagaattgtgtacagaatctgtttttttaatagttcgtgaggcagttttaatatcctgccaattttaagaatcaagattgataaacttaaaaagctctcttagaacgcagagtgaaagaagagaggggtctcatgagaaagtagttggtatgcaggacaaagtagagattcagccaaataattgtatgtatttctgaagaaattatgattggaatagaagctgtaatcagtgatatcattgaagacaaatgttctgaaataaaaaaagaccatagcatatacattgtaaggatttaccatgtttcacacaaagtcagtgtaaggagaggctcatttagatttttacctggcaataaatttttgttggcatgtgcagtagatggaatgcttgtgtcccttcaaaattcatatgttgaaacctaatcttcgatgtggtggtgtttggagatgggacctttagaaggtgactaggactcaaggtggagccttcatgaatgggattagtgcccttttaaaagagacctcaaagagcctccttgccccttccaccatgtgagtttacagaaagaagatggctgtcaatgaatcaggaagtgggccctcacctgacacgaaatggactaagacagcatggctacatcctccatttgtaatagggattcaacttgcagatttaggatgccataagcctaggtaggggctacatctttgttatcagcttaggaaacaaatgaaatgtagtgcaggtgtttgaaatgtaaacttgtgacaagatctcagttccgctggtcctttcctgagtttggtttgcagttaagktgcttgctatctgattctctttaacctgttgtttctcacctcacctagtgtctgatgattcaaatctttgtatatggaggtgaacacagtagaagtagggagacaaagagcctccttaccctgtggcagaggtgagttctggccctggccatcagccatgtcatcaatgtggatatatgcatggcatggcctctcccagttcaaccaggtaggggtgattcacttctatcagtcttgctagtaaggcaaaatcctacctgtgtatgaatttgaccaaatcctatacttggggaaattagttgatttcttacagtctcatagaacccagtattaatagggtctgctgcagtaatatttagtatttataatatccctttcaatgctgagcattatagaaaagccccgcaagacaaggttgttgttgatcacastgtgatagttatgatatggattcagagaaagtaaatgagtaccttaaaataatttttcttgctgaacatacaaagtctaggtccctaaacataaggcaagtttttttaggatacagttgtctccaaagttaataatgacagaacctcttcagattctttttttaaatgtttagaatttaagtcaaagagagttttgtatagacttgtctcagtctttaaccttgacgttatcaatgacgcttatcattgacatttgtttgtctcagaatagtattgacctcgaactgttctcttctaagagggaagagaacaaaaacttgttgaatttataccaaattcataaaactgagctaggtcctattcataaagtatttaatgtaatcctcacaaatacccggtgtgatagctctcatttaacagaagggagcttgatgttttataatggaatttgcctaaattcactcagtcttggagatttggactcaaataagtgtgactctaaaggccatgtgtttttccctgagagccctctaacagaggtgcattgctgctgagagttaggaccctgaatgtgttcaccagcggtggctgataattggtccccttctcaacaggttcactatgctagacaggtggggaagatcatgccatggagaatacattgagccctcctatccacacccccttcagtcagagccacacctgaggtgggccccacaggagactatctcctgttttatcattacccagaggaggatgttctccagcctctgtcaataattcctgtgttacaaggatacagaggatcagccacaggacaaaatggggaactttgctccctgcctgttggtgtatatgaaagcatgttttcttaatcagtaactgtaaaaatattaataactataatgtagaagtttttccatttccttggcactgtattatacatttagatatactttttctgatttataaaccacattattaggtggggtttttttttgtttttgtttttgtttttttgagacagagtcttgctctgtcgccaggctgtagtgcagtggcgcgatcttggctcactgcaacctccacctcccgagttcaagtgattctcctgcctcagcctcccgagtagctgggactacatgcgtatgccaccacgcccagctaatttttgtatttttagtagagacggggtttccccatgttggccaggatggtcttgatctcttggcctcgtgatccacccgcctcagcctccctaggtgagtgtttttatcttccatgttcaggtgatgaaactgaagctcagaaagtttgggtatcttggctgggcatgatggctcacacctgtaatcccagcactttgggaggctgaggctggtggatcacttgagctcaggagttcaagaccagcctgggcaacatggtgaagcgccatcgctacaaaaaatataaaaattagccaggtgtggtggcatgtgcctgtggtcccagctacttgggaggctgaggtggaaggataacttgaggccaggtcaaggctgcagtgagccgcgattgcaccactgcactccagcctaggtaacagactgagaccctgtctcaaaaaaaaaaaaaaaaaaaaaaaaggttgggtattttgttcataagatagctggtaaatgtaagatttgaatccgggttgatcagatttcaaaaatgccatttcactaatgtaatacagattctgactttgatgaatttgagtatacgtatgaggatacctgttcagcaggcaaggctccaraacccattttacatgtgggaaaactgaagttttatgatttactgaagttaactcacccaggaagagacaaaggtagaattttaatctgggtctctctgactccaggatctgtactccaggaagtgtagcttacaatctgaagacagactgcctggagttttttttaaaagatgaggtctttctgtgttgcccgggctggtccaaacttctgtggccggtcttcttgcttctgcctcccaagtagctgggattataggcatctgccactgcacccaggattgcctggatttaaaactcaggctccatcactcagctctctgacctaggtgaagtgacttaactccctcagcctctgtttattcatcagtaaaatattagtrctttcctcaaaaagtacgttttctgaaagttaatgagatgataaataatacaagacttagatcagggcctggaaggtcttagcaggtcttaaatgcccaatgaatgttgagatcttaataacaaaatagtaataataacaattctctatctgaagtacaagagataatatgtcagaatgttaaaataagaggcttctttgtatcaccgtattattgtttwatattaagagtaataggtacagagtatacattactggagtctgacctgtgatcttaacctgccttttccactcacaaagtatgtgaccttgggcaaatgacttaacctccttgaaccttgttttccattgctaacatccagatcatagtaaaccacagagagttgttgtgagttttaaataaaatcatgtctataacatgcatagtacagtgcctggcagagtatgcgctcaataagtgttcgtaaaacacccttccttccccttcttcacagaagattgccttttgctttcagggcaacagttcagaatwtttgaaatcagagatgattgttagccactattaccataggttagttttgagattttgaatctttgaacatatctaaagtatattttgtgctctgaaggtaataataatgaaactaaaagaacaaaatgtataatttcagagaaaaaatgcatgatgtttcctcaaaactgaacagaagttctactcagcttgtatttaaaaatagacacttcagaatatctggaatgaatctaattcttcggtagcctgaggttgctttgccttccagtatttactgtgtcttttaggtgatctgaaaagattcatagaaggaggaaaaattaggagatctaattcagaccttaggtggtatgagtttctttaggtacttggaaattaatttttctttctgtaaattacaacraaaccaaacctaccaagaaagtccatataaggggaaaagaagagtcttttaaggactttgctgtggcagaaggtttttctttccctgaaacaagcccatatctcattcctcaagaactgctgagcaaaaccatgggggtaactgccaaagccagatgtcaaaacctggtacaacgattgctgtctctttgcaaacttcagcatcttgctggagtaatcaatcccagatgtcctggaactctgctagttttccgatgtactctcctgcttcttacctcacctcttccggaaactcgttgactacactcactggactttcattgctaggagcccgaattcttggcttttgaagcctctgcaaaaaagctaaagtagaaatggctccttgaaatcagagttaatttcaaggttaaatgatagttgcaagggcctcaaataaaattttggtgtacagaaagggcatacaaaaatctcagatttaaactttcaggttggttagtctaacttttacctaaatgtaaaatgtacttcttttgtacatttctagctcatttaagcactagaaatactagtatgtttaagatatagtcccttacgtgaaaacagacatgtatgaccagattacaagttagtctgtagtaagtctttagtagaaatgtaaaggaaaagggcaagtaataaatcatgaggttagaaatgtgggtggaaactctgcgtaggttgggggatgggttgcaggttcttcgaagaaaagtagccattagcaggtagacaagaagctagaggagagtattccaagttgcatgaacagaagcatagtggcgtagatacccgatattgctgaggaaaagcaagtggcctcgagtggttgtagtttaaggtacctaaggagggacgtgctggacatgagtttggaaagacagactggggtgagattatggaatttttatgtactgcgctaaggcatttgggatttatttagtagacagaaagcaaccatcaaagagttttgggtagatatgacatgatcaattattagctttaaaacattaactctgacagcaatgagaaggatagatggtacctagggagaagtggggagagcagttaggaggtagatctgatagtccaagggagagatgtttagacccttaattatctaaagccgtagtaggaagaacgtgtagaggacagatcgagaagctatatggagtctgtattgacagaccgtgggaccagtcagatgtgaggtttaatagaggcaggaatcaaaggtaactttgaagtttctagcttgggcaactgggtgaatggcaatgctattaaatagtattggcaagaggaataatcttggaggatttctagggcgcctgagggaagatggtttccactttggatatgtttgcaatacccacaatacattcacctggcaatggctgttaagttgttggctgtatgggccaggagctcaaagaaatgattctgaagctaatggaatggataaaataacccatggaatacatacatgtgaaacaagaaggcttaggaaagaactttggagcatgcttacacttatttcagagagaatataatatggtgatttggtagcagaacagctggggctcaaatttgagctttcccacttatagtgagacttcctaaggcttactttcttcatctgtgaaaatgcacagaaatagagcacttcattttaagtgctttacttagtgtatggcacatagtaagcttctgtgaaatgttaattattgtaattatcattattgtattatttagggatcacgcagaaagaggaactgaaaaggagtctctgaaaaagtccttgagaattaggagagtcaggaaaaaataggaaatcagaggacaaagtttcaatgaaagagaggccagtgtcattgttacgaaagacacgaggagacacttcaaagaggaagaaatgcatatgaccaataaacacacacacacagatttccaatctcaggcaggattcaaaacataaaatgccatttttaacctatcgtttttgtggtaatgaaaaatacaggcaagaaaacccagctctgtcaaaagtatggggagctcagccttctcaatactctatttatatgggactgtatcttgattgcacctttttggtggatatgttgggaaaagttaatagaatgtttaaatgcctgtaacctttgactctgaaagaccacttctaagaatttgtcttttgaaatccttacacaaaatatgtatttataaatataagtatatatacaaatatacacctatacatacataaatatatcttttagatttgtttataatagcaaacaatgggaaaaaaatgtctaccagtagaaatactagtacatttttattgccatataatatggtcattcaaaggcatgatgtagagctttaagtgtcatggaagaatattcccatatatactgttagggctaaaaatatgaaaagtacacattagtgagcaatatatatagcataactcataagtatatgtaaatatgtagttagtgcaaaggacagtaattatctctaggacaggattatggaggactytcaaattctatgttatgtatttctgtgtcattttactttttacaataaatattgtgatgataaaaaagatacattttaagagtatggtatatgtgtcaaatattaagagagtgccatgtagtggtaaggaatggactagtgccagatggcctgggttataatcccagctctgtctttagctgtgagatcttggacaaatcgctttacttctcagtttcctcatccataaaatggggatgataataatataatatctacttcatagggttgttatgaataaataagttaatgtaagtaaaactgcaaagaaaggtgcctggcacatagtatgtgctaattagagatgatgagagtgttaatgatgatgatgatgatgatgatgatgatgatgttaatggtgatgatgaagatgacaatgattgcagatggaaagggaaggatgactaatcagaagccattatattggcaaatagaaaataatcactgacatcactgatattagcatgagctgtatttgtagagaagacctttgagattactgtttgtccagtacctgattaaatacctcccataatcaggaatttactcattatctctcaaaatggccccttccttccattactggacagttctgattgttagaagaatgtagtagttaaggtcatagactacatttaaagttagacatatctgtgtttgaatccaggctctaccactttctatgtgccattaggcaagttatcttaagccccacttttctctaatgaggattagaatagtatctataatgtagaaacataatgaagagtaaatgagattatttacataaagcacttagcacagtatctggtatactgttaagtgctcaataaatatcagccattttaacaactctacctagtcatcaaacttactggatgtatgaaagcatgaagttatcaactttatctttctatctgtcagatgtctctggaacagctgcataccgaaaagttattttgatataccttttgatgggtataaagctgtagaaaccaacagaaggagcagggagaaccatccttttctcctcataagaggggagtaaggaaggtgcctcaatgcctattaaactattagtgatattcagtcctcttggtcatatgaacaaaatggaacagcctcttttgggctgaggggctggagaaggaaagtagggtggagatggggatttgggaggtgattatttccagagagaagtgagcaaggaaaaagaaaggaggtgatatgctgcagtacattttgtatcagccagaccagtcttgggcaagaccttagtgatgaaatgtatgttccataagctgggttgtttccaggctgctgcattcatcttcttttcctattatttattagtaaacattccaacactccatctacaaaattaaggaggaaatatctggccaaaccttggtatgagtgagtgaggagcacaatctgctccaccagagccaggtagccaaacaaggggcagcagcttttccaaatcaggattctaggactagctggaggcattggggcaggtagagaagtgaaaactcagaagcctttagttccctgcttgagggtctcttttatggggaacaagggctgctaagccacagtgagccagctcagtgtaccttatctttagcagagcagtggggagctctgcaatccccagctactctgccacgcccacagaaatggtctgataggagaggatagcatggaatagggcaggcagagcttgaggttccagagcaaaaggctgggtttggtggagcttgattattagtgttgtctgccctggggtacgggtgggggaacagctggacttctaccacatacttgctgttcaggtatagagaaagagcactgtaytctgagtcaaggcaccttgtgtgtgaatcccaaaaaccatgcgaccttaagtcacttaaacattgagtctcagtttcttcatcttcattcattcctttaacaaacattttttgagcacctactaagtgccaggtgcagttagagctgcaggtggtaataaagataaataaaacatggtcattaatcttaargggacaacattctagtgtaagagaaaacatgaagaaataataacatgaaatttaagttctggaatagcattctcagtgcaatgaaaggagagacaatctatgagaattggaaaacacttcatagagagggtgacatttgagccatttcttaaaggacaagtagcagttcatccagatggagaagagaagccattcctggaagaaggaactctacatacaaaggcacagaagcatgacagagggcagtgtatggaggaatggtaagtactttacagctgttgtacagggcagcatgtcctgaaaggggctgcaagaaatgctgattccaagggatgtgtgccagttctctgggggaggaagaaaggctctgtagcagaaagacaaaaatcatttaaggaaaaaaaaaaacaaaaaaaacaggtttaaacaaagtgacacaggttacttttctgaagggcttctcaggacttttaatatacaaaaccttcggctgggtgctgtagctcatgctgtaatcctagcactttcagaggctgaggcaggtggattgtctgagctcaggagttcgagaccagcctgggaaacacagtgaaacccagtctctactaaaatacaaaaaattagccgggcgtggtagcatgcgcctgtagtcccagttactcgggaggctgaggcaggagaattgcttgacctgggaggtggaggttgcagtgagccgagattgtgccactgcactacagcctgggcaacagagcaagactgtctcctaaagaaaaataaaaaaaaaattaaacattaaaaaaaatacatatatatacaaaaccttccttattggcatgttgggaacaaatcaggtttttaacatttttatttttatattttaaatttgtagtgacgaggtctcactatgttgcccaggctggcctccaactccttggctcaagtgatcctcccgcctcagcctctcaaagtcctgggattacaggcatgaacacaccatacctggctgcaaatcagttttttagaaaccattgtattttacatacctaaagtctttttgaaatgatcagtgatttaaattttggcaaataaaaccttgccctgtctttagaatcaaagtagagaaactaaggtttggttttgttgaaagcaaagggtgtagtgtatacttgccctgagggtatacatgaatacttttgcagtttggtaaggaattttggccccactttaggacataaagtctttatgaactatgattatctcatcaactatttaatctgatcatagaaatatgacttcagtgcatccctatgaattaatctttttgattcatggtggttaagagctgtagttctggagacaggcaagcctgagttcaaaccccaggactaccactttctagctatgggcaatcctggtttcttcatctataaaatggggatgaagtatagtacctatctcagtgttgttgtgagaataaatgagataatgcattatatgtaaagtgcttagcagagtgcctggccccatagtaatcatgtactaagtaacagctatttttagttttactgaaagctggtcttygactttattaccttctactggcaccactgttgcacgaagcaaacggagataggggctgaatattttgaaaagctactaccaagctgatgtggaaaatattttgctggttaacatctcgaaaaagatatagacttatcaggttctggaaacactgttagtctcatagacaagcagtctgacacagtcacctaaactcaaagataatatatacactatggaaatcagttgtcctttcaggtttcagacaaggggaatcctgccaccttgtggtgcgacagaagtaggcccgaggctgattcccacttactatccctagcagagatgcagccctcttacagttctttgcccacctctgaatttatgagacccctgggcaactaacttaatctgtgcctatttcttcagctaatttggaatctcattatctcctggtttactgcaaaggaagttaaagtgccagatagctttctatattttatacagtccagtaatagagaatgagcctgtctttagtgcaacttgcatagaaaccccaagttcataaaattttgtatttcatattctacagaacaaatattcttttcaagtaaaaaaagggctatgaaaaccacttttttcaggcttgaggtagaaataggaggtgactaaagaacacttaatagtaactgtgtttctggagcagtcttttggatcataatacatcaaattcctgctcagctccttcagtaatgggaaatcagaggacagacatctcaacggctagaaacaagcaagagagatctttcacagggcctcgggctgtaagtctccgagctcgtgagaagaaaccacttgaaaatcatcaactatataaaaggccctaaattagataagttttccacctgggatttaaacaatccaggtggctcaaatatccctggtttgccatctgaatcaagggaagagctccctgctgtttaggaagaaaacccgagactctagtaagattttagaggcctattagaagagccagcattttgagagtatagtcatgtggtggaataatggtgacacagtcgcctcaggctaagttcagcctttggctcaggtaaggcaatgagatctgctgctgggggaggcagggccagttatggaggaagagaaggcaagaaccaagaaaaatgctcaaatggttttctcctttcctctaggtcttctgttatcaaattgaaaacctctatacaggatagccaacaataaagacaaccttgttgatgataaaaattctcgaccacaaaatgtttctcaacactgatagcagtggcagatctaaaacaacggttttttattaaggactctgggaaaaaaaggtccacttagcagcagcattccaggtgaaatacccaagagccattagaaactaggatcctggctgggcgcggtggctcatgcctataatcccagcactttgggaggccgaggcaggccaatcatgaagtcaggagattgagaccatcctggtcaacacggtgaaaccccatctctactaaaaatacaaaaaaaattagctgggcgtggtgacacatgcctgtaaacctagctactcgggaggctgaggcagaagaatcacttgaaccggggtcggaggttgcagtgaactgggatcatgccactgcactccagcctggcgacagatagagactgcgtctcaaaaaaaacaaacaaaaaacaaacaaacaaacccaactaggatcctgatctatgacttgggggaaagaaatcttttagtcacatgctttaagttagttttttgtgtcactggaactccattaccttccatttccctttttctaactctattcctttcagttctgactttttaaaaaattctgcgatacctaaggagtttattggtgaacactttcatgtactacagttgaccactgaacaatgcaggggctagggctgccaatgccttgtgcagtcaaaaatctttgtataactttggattcccccaaaacttaactgctaatagcctactgttaactgggagccttactgataagcttaacagttgattaacacatattttgtatgttatatgtatagtatataatatattcttacaataagtaaactagagaaaggcaaaggttattaagaaaatgataaggggccaagtgtggtggctcattgcctgtaatcctagcactctgggaggcagaggaaggcagactgcttgagcccaggaggtcgaggctgcagtgagctgagattgtgccactgcactccagcctggatgagaaagtgagaccctgttcaaaaaaaaaaaagaaagaaaataaggaaatacatttacattactgtatttattgattccgttaagtttacattgtctgtttacagaaagaatcctgggactgaaatgaggggcatccacagccacagacctcaatctttgatacatatcaagcaattcagctttttcttgtaatgtcatgacttctacttcttgagaacacttccagcatcactagtggcacttcatatgggtcccatggtattatatgaggtttatggtgcactaaacatgatgaaaaatacttaagaatctcgagagagtacttttttctgccacatgaaatttactggagagttgaactgctcatgcagagatgattagcatcacatagcgttttgagtggatattcacaacatctgcgcgcactgccgcagcagtaggaggcagctacaaaatgattgcagtacagtacgtactccagttggttttatgtggctatgatttaaccttgcatctttacatttgtttacatttctctggactgtgaatggcaccatgtactgtatatgtgtgtaaattttgagaaaatttagctttttataatagatttgtgcatattttgtagtagcaaatgataaaatagactagtatatacatatattttatgcattcataccttttaaaatgtttaaaaatatttctaggcaacgcagtttgtgttttttcaaattgtcaaaaaactccaaaaaaaaaaacttccaatgtatttattgaaaaaaatctgtgtataagtggatttacacagttcaaacccatgttgttcaagggtcaactgtatttggaggtgtttttagtcatagcctgtttgaggtcaccaaaactgccttgggaggaatagtttgaaccttctgaaacacttaccctgatctgatttactgaactcgtcataacatgttcaaagtcagaaaggaccattttattttataaagaaactggggacggccgggcatggtggctcaagcctgtaatcccagcactttgggaggccgaggcaggcggatcatctgaggtcaggagtttgagaccagcctgaccaacatggagaaaccctgtctctactaaaaatacagaattagctgggtgtggtggcgcatgcctgtaatcccagctactcgggaggctggggcaggagaattgcttgaacctgggaggtggaggttgcggtgagctgagatcatgcaattgcactccagcttgggcaacaagagcaaaactccatctcaaaaacaaaaacaaaacaacaacaaaagaaactagggacaagagagtgatttgttcaaggtcagcttggtaattataaagcagacttcctggatcacagatgattactctttccatcccactctgctgcctccaccaaactggattaaaaaggcttgttttaggaacagaatactcactgtggttgtttatgaagaaaatccttagactctgagcaagtgtatatctagcgaaagaatttgcaatcttgaataatattccttactttcttgtgaatttagcgacagagaaatctcatttgggtttgcactataaataactttaatttttctctcttcatcttttcccagttgtctaacttgatttaatacagctcaaatggccgggcgcggtggcttaagcctgtaatcccagcactttgggaggctgaggcagggggatcacctgaggtcacgagttccaagaccagcctggccaacacggctctctaccaaaaatacaaaaattagctgggcatggtggtgggtgcctgtaatcccaggtgcttgggaggctgagacaggagaatcacttgaacctgggaggtggaggttgcagtgagccaagattgtgccattgcagtccagactgggtgacaagagcaaaactccctctaaaaaataaattaataataatacagctcaaagaccctgtgtctttggggatccaagtgtatcactatcaacatctatatcaacgcactcagtgcttacagaaccacattttggttcttcattcaggaaattatttcagtcatttgttcagcctgtaaaatctaagaatcaaccagtacccaaggtatagtgagttgtgttctgctgtggcagaagcacacatatactaactaagccaaagccttgtccactgactggtaggccttctcctggcagttgccgactaactcccaggatgctttagggttggcactcaggatcaaggtcccacattgcagacctggctgaaagcagctatatattccattgcccttctctgtggtgcttattaactggtcacttggcctatcattgttcattttagccctttctggagatggggctgctgttcttccccagaatattctgaattgattacagtagcatcagaagagttgcttccattttcacatacgtagttgaaaatagctcttcaacaatgactgacattaaaaaaaaaaaaataccagaaagaaatggccattcagactccattttgggtggcaccaaaatttataaaatgttactattttgcaatcctaagatctccaaactgacaaacctatatcaataaacagtagcataacactgtgaaataaaattttatggtgtacctgttcctgcatttggattgtttttaatgtttaaagtttttctttattgtcagtgtaaggttgccattgtctgaggttttgatattaaaatgttttataaaatggtggtgatactgaatcatataattttaacatccttatacctagtaaaataagttggcacctatgttggtccccaaagtttttcccaaaggcatttttagagcagttttaggttcataaaaaaaattaagggaaagctagagatttcccatttaccccctacccgcacacatgcctagcttctcccttatcaacatctcccaccagagcggtacatttgtgacaactgatgaacccacactgacacagcattattacccaagtccatagtttacatgagggttcactcttggtggtatacattctgtgggtttggaaaaattataatgacatatatccaccattatagtatcatacatattagtttcactgccctaaaaatcctctgtgctctgcccaaaagttttaaaattttactattttggtgaaatcccaaagtcttaacaagccacattagaaatataaagttgcattctcactgcaaaaccacagaagctactttctaaattcaaccaatctggataacccaatccaatcaaacacctgacatttctaacagatctgagctaacatacagagctcttacaattcttctgaattagctaacaagcactgacatttttgaggtggatgaggattagctattttccaacaatctctgtaccaagttagaaaaaaaaataattcaagcccagatcaagctgtctcacatacagatttcaataaatattgttatttttattttattttttgttgagacagggtcccactctcctgccagactggagtgcagtggcatgaccatagctcactgcagccttgaactcctgggctcaagcaatcctcccgccttagcctctggagtagctgggactacatgcatactccacacctggctaattaaaaaaaaaaaattttttttagagatggagtcttgctatgttggccagactagtctcaaaactcctgggctaaaatggtcctcctgcctcggcctcccaaagtgctgggactacaggtgagagccaccacacctagctcaataaacattttttagcaagcaaacaaaaaagtttatgtaaacggctgggtgtggtggctcacacctgtaatcccagcactttgggaggctgaggcaggaggatcacaaggtcaaaagatcgagaccatcctggccaacatggtgaaaccccatctctactaaaaatacaattattagctcgatgtggtggcatgcacctgtagtcccaactactcgggaggctgaggcaggagaaccgcttgaacctgggaggtggaggttgcagtgaactgagatcgcaccactgcactccagcctggcaacagagtgggactccatctcaaaaaaaaaaaaaaaagtttatgtaacctgttctgtatgttcaatgacgtactacctgctgatttggtaagttcacccaccactgcattaaaggtccacttaaggcaggcttgacaatattccagaaatagtactgtcctaacgtagtcagccacggcaaccaaaatccttggacaaaatggcaggaagcaagaccattttggaatcaagtgtcaggcaccatgcctaagggtacaggccacagggtttactagattgttacttcctttttactttagtatgaggaaatactctgaaataatttagtaagttcacatatcctgaatacctctagttttgccagtgagagccactactagtatctattataatgatcaacaagctatgaatttcaaaaatatatttcacacatttactctgctgattatcgaaatctctggacgtgactgagatacagatacgaaaagcacttgaaaccgctgcttttggtgtttctgtttagaacactagctgtccactcctgagagggaaattctgttaaagctaatgactcctcctggggtgcttgtaacctgattctagtataaaagcagcactgcctattccaaagagaatgaaagcaaattacaaacataattgggaaaagaaaaaatactatacactccgatttctcaggacccaatagattttatttcaggtggggataagggacaagcaatgtgaagacagggaaggaaagaaggaagtctctatgttctgaaggactgcctaccccactgttgagagtgccacattctgcccttttagcaattttaattaatttttactaggactttggtaacaccacagaaaccctgtggcttc

SEQ ID NO: 97442 - DNA, 92698 bp, Homo sapiens
atttttagtagagatggggtttcaccatgttggccagactggtctcaaactcctgacctcaggtgattcacctgcctctgcctcccaaagtgcctggattacaggcgtgagacaccacacccgaccccaaatttaatttaacaaaggactaactcagaactaacttccaaccaaagctgactcacctcaaatctcattggtgcagaattgcttcatacacccatgtgtaatacagtaactggcaagaaaaagggactgctgtgattgactcaaaccaactaggaaatagccctggagctgaggctggggacaggctttcctgaagcacatgctggagccactgaaagaaaaatgggagttctcctttctactagaaaggagagtgtgtggatgaactggatgctgggtgggcagcctctcactagtacttacggtagtaccaaagacgagttaatcaaggctctattatgtatccttaggcccttgatgcatgtctcattatgaccttaggacagccttgtggcagagggaatgattccatttaatagacagtaaatgggatctcagtgaggttaaggacataaagctaataagtggcagcacgggaatccagacacatgtctgcctgataccaaacccattttttcccatctgcacgctgccttctgctgtaaatatgtaaatgtttccacaaaattctttttcatactttgccctgatagcagcaggggctgcacatcccaacctcttttcagcttagctcaccataaaaagcgggatcagagatctacttctcagctctttctgatttcccccagggaagttacaaaagaatgacaaaaacttggagaaggcagatatcattagtattaaagagaactggaggtttagggggaaataaagctgaataaaaaacagcagggctggctgagcgtggtggctcacgcctgtcatctcagcgctctgggaggctgaggtgggtggatcatttgaaatcagaagttcgagaccagcttggccaacatggcgaaaccccatttctactaaaaatacaaaaattagccgggcgtggtggcgggtgcctgtagttccagctactcagaaggctgaggcaggagaatcgcttgaacccgggtggtggaagttgcagtgagccaagatcacactactgcactccagtctgggtgacggaacaagactccatctcaaaaaaacaaaacaaaacagggcctatgcatccctgagatgtgaagcagggggagataagggatttagatgtatatcctactaggtttttgctgtgttctgccatgcagttgtctgggcaggatttatttatattttaatttatttcaggggccatgctaatcatctttgtattgttccaattttagtgtatgtgctgctgaagcaagcactgggtaaggtttaaactgtctagttctgtgtgctggggtttggcattggagaaggctctgtgatgcatagaccttaaattagagttaggtatattattaatccaaagtgatcctgaatgctttctatcatttttttcttgtcctattgcactggctaaactgacttttagtactacacagaatagaagcaacaataacaatcatccttgtcttgttcctaactttagtggactatttacaatattttactgagttagatgccttaggttccacgtagctgctctttatgaaagacctcactgggttacccttcagtcttggaggagtctgggtattggccatgacatttgccatgaatgatggagttctctctgccaggtcctcatgccctggagctgtacggctgcacttcagctgctgcacatttgactttttgagtagcccttgaatctctgctcttccttggcctctctatagtttttggtataatagcctcagcttaagtttgagttttgtaggaaaacaatgggcctgtgctgacaaagatacaaagtcaaggaacaggattttttatatctcaactaacttggtcctagctttgacatttacttgccatataacaatggatgaataacagtctctttaagccttagtttcatccaccgtgaaatgggaaaaataatatctgtttcatagagttgttttaggatcatgtaacttatgtaaaacactgaatagttttccaggcatgatataggcactcaatctcatattatgaataagcttatgatgcatgggggatactgatgacagctttcttctgtccaggcaggcccagctacatggtggtatgaccagtgcagtcacacagccccatgcttagcagggctctgcacttagtttaatgctctgctgttgccatcttgaagttcttaatttttaaacaagcatcccatattttgcactgtttcttgcaaacagtgtagccagttctgtctccaggaatggatccagcactagtactggcccttctctttgggaaacatccttccattgatttcttagggagtaaatcccttgaagagtaacctcccatagaaaaattagggttagcaccctgtgtatgtttatctctaactgttccattctcagtaacctacacatcctctctcattaaaaaaacaaaacaaaacaaaaaacactttatattttacagaagctattagatccagagaggttggtaggggtgctggtgaaatggaatggtgatttgggattttggaatcaggaaaaagatctaagttcaaaaccctgctagtccctttctggccgagttacttggacaaggtaatgtctctgtcctactggtaaagtgtatgttgcaggggaattacattctttgttggtaaaatatatgcctcaggggaattaaacagataatttatgtaaagtgcctttcacagagagtctggcacatagtaggtggtcggtcactattaattcttccagctcttgccagaaataactaaaatcagggcactaggacttccaagccgtgctgctactaataaaagaaataatatgatttattttttcacaactgtttggggaaaggcctgtgcttcataaatatgcgttggaaagtacttagcaaatgagtagaaataataaaaatatgtccaagtaaacagctcctataaatatgtcacttggtagacaaattagtgttttatcactactaaatactattgctcgctgaaaaggatttcggattgcttgcacaatgggtacattattgaatgcctctgtggaagggcatgataaagatgaaaaatagtgacggtggtaatgcctaaggtggagaaaggaggagcgtggataaacgcagctcggaggcctctgtgctgcagtgatatgcacattatttagcagcattccaatgatttgcttgtaatatggaccagagggcccagaaaaaaatgatttccacaggatgtcatgaatccaaacttcaattattggatccaatcagtggattaagtgcaccccctttcagaactgaaccttcaggttgtaaactaagtttatgaaaggacatccccaggtctcaccccacccttgttctggacctattaactttttttctgtttgtttgttttttgttttgagatggagccttgctctgtcacccaggctggagtgcagtggcacgatctcggttcactgcaacctccacctcccgagttcaagtgattcccctgcctcagcctcccgagtagctgggattataggcgtacgccaccacgcctcgctaatttttgttatttttattagagatggggtttcactacattggccaggctggtctcaaactcctgacctcaagtgatcaggtctcccaaagtgctgggattacaggcatgagccaccgcgcctggcctggacctattaactttctataactatgatttctatcaagagaaagagtgatgtggtggaaaaggctgtgccttcatcacagctaggaatctatttcagaattgagaggatggacaaggtcctggcatatctagggaaaaggaattagagggaaaggaggagaccataaatgcctttggagggtagggctggaaatgaagacttagagagaagcaaaccagacagaattgcatcagggaaagttacaaaaatagccaggaaggaaaatgaagggtacatttaattcggatgtgggaggcctttagcaggtcagtctttccgtgcattccaggtgattgaaaaaatcagttttaaattccagctttttggggcgcagtggctcgtcctggtaatcccagcactttgggaggccgaggcggcagatcgcttgaggttaggagtttgagaccagcctggccaacatggtgaaactctgtctctaccaaaaacaggcaaacaaataaacaaattagccaagcgtggtagcgggtgactgtagacccagctatagggtgggaagatcctttgaacctgggaggcggaggttgcagtgagcggagatcacgccactgcattccagcctgggtgacagtgagactctgtctcaaaaaaataaataaattgcagctccgtgtattcaagacactgctggttgaaagaaaaaaaagcaatacattccagctccacctttttctaaccatgtagttttgggtaaattacttaatatgtagatcctcattgataacatgggaataatagtactcagtttgctgggttgtgaggattgaaaataatacttgtaaagtgacagagtctgatatgtatacgtgatcttattgttattatttctgaggcgtcgtctcgcccttgttgcccaggctggagtgcaatggcgcgaccttggctcactgcaacctctgtcttccgagtagctgggattaccggcacccgccaccattcctggctaattttttgtatttttagtagacatggggtttcaccatgttggccaggctggtctcgaactcctgacgtcaggtgatccacccacctcagcctcccaaagtgctgggattacaggcatgagccaccacgcctggctcatgatcttattttccttacgatattccttgtttgaaaatacaaattgttcagaaaaactaggagttctcaatagaacctaaagcctaagaaaattgtgtcactagacaccatttaaaagaaggattagaacttaatattatgttcatgactaggcatcgtagcccacgctggctaaccatcccctgggccgccctgctgcttggcggtttactaaccacagctacatgcatgcgctcactaaatcctcacgccaacctgcgtttctgggatgagaaaaccagagttcgtaaaggttaggtaccttgctgaaaggtgcatgggtgaaaggcagggatggatcctcgctgagtcattctcattctaccacagccttcctcagcagcttcctgactttcctgaggggaagtagctagtcctagcggtttagactgggcagtgctagagtgagtgggacaagcatgggtttttaggtcccacagacccggcttctaatacctcccagttgtgggacgctgaataagctcgtaacccctagtggggctgggtttctgcaatcatgaagcgggggaaaccatcgcctgctcatcgcaccgaggagagagtcaatgagacatgaaagtcaggcacctttcaaagttttatgacatgcgttcagaggtgttgagggactcgctcaaggtcaccaagccgggtcttgacccagctgaaacttggacctggacccttgggcgcctcccgcagagttgtgtgaccaaggtaaccagcagcggccgaccccacgactttggggaaacgacgcctcctacggccccacggctcaggccagcccggccccgccgtcgggagcctcagctccgccagggggcgcgagcggaggccgcgctcgaggccgccgggcgcctcgctcttctctatggtggctcgggcgcggcgggagcggaggcgcgatcccgagagggggcggggccgagtcaggggcggggccgcgcggagggcgggagcggycgggccgggccggctggggatgggtgggagggggggccgacttcctggggccgcccgtgaggatgtcgcgaccgcccccgggtgcccctcagccccagagacgccgccgcggcggagtccgcagcctccctgcctgaggcgtccgcggccgggatccggcccctcccctcgcctcctctcctaggtgccggccgggagggcggccgcagcaggtgaggaggcggcggcggcggcgctgggggccgctgggcgcccggcctggggaaggacgggaagggggacggtcgggtgccgtcaggctgtggtctgggggcccttcctctgtgtggggcgcggcctgggactctccctgccctacaggggtggggrgaagcccttggctggctggaagtccccgccttcagggcagcccacacctgtcctttgaaaagtcccctcaaagaaagcgtttcacctgtgggggcagtaacaggagacgtgcgtcctcgattatccccaagcgccctgcagaccggcaggtctagttggcttgtggggaaaagatacctctttgtacgtcagaagaaactgaggcaggtccgcggcggcctgcttacccctttaaaggaaccagcccgtccctatctccgtcttagaggaggcggctggaggagggaggtttggagtttggaggtttgatggagaagtttgggaatgcggttctccccgcagggtccactgttccctcgcttgggagttgtcctctgttcgcgatgtgtgtgaggtcgccactgtgcggcagcggtcaagaccgagagggaaatggggcctctcttcagccggctgcccaggagacagttgaccagacatggggaagtctggcgaaccaggggagccagagcctccgctggcacgtctgctcagagcttgagttcaggctggcagaagagataaacaacagcatatcattttctcctttttgttggtctgtcatttgttctaggggggaagaagactgcttgtgtaatcaagagtgtaccgtgcaccccccagtctaccataaggaaggataattgttagcttggaaatagggttttacccacaactgtctctttgctccctggttaaaggccagagtgacgtgatgagcaaacatcccggggtgcatgtggccttctaagaaagcagtgagttccttatgtatccctttgattattggtttggaggacagagagacttcctgttaaccactgtcgctgcaactgtttggggtgccttattctccccgtgacagttcaatttactgaaatgtgggccgggctgcccgtttattataccattcttctaggaatgggagtaggcaggggacaaggtactgggctgaatttgtgtacagagttctagggctgcagcctagccgtggcagctcctttctgttcaggggatttcaggtttgacaacttctttatccttttctctgattacattctctttcacattcaaggaagtagatgatggcaaaggtttccgaacttttattgtatatttcctaattctgaattttagagtacaattcagaagttacagtttatttagagktattcttaagtttgaaaatatttgggtatattttcataacaattgcagattgatgtggcagggctaatatcttgattgtgattgaagaaaatgttcatgtaatctaggacgcactcattttaatgcccgtctaattacaaagaccagcctgttaaaaactttcatattgatcaggtagacagttgtgatttcttgtttacattgggatcaagggttgtaaatatttaaatcgaccagtttaaccagcctccaaaataacatgcacaaaaaaagaaagctcttctcagaaaccttaaaaatcaatttctttcaaaccttctctcatgaccaagccagttgacataactctgcttggtaccatctaataggaacaccttttttttttttggagacagagtctcactctgtcactcagactggcgtgcagtggcgtaatcatggctcactgcagccttgacctcctaggcttaggtgactctcccttctcagcctcctgagtagctgggacctcaggcatgtgcaaccacacccagctagtttttgtattttctgtagagatgaggttttgccatgttgttcgtcatgaactgggctcaagcaatcctcctgccttggcttccccaagttctgagattacagatgtgagccaccgcgccaggccggaacacctcttaagggttgtggaaaaggcgtttttagtgaccagcatttaagaagacaaaacaaacagcaacaataacaaaaaagggcacaatttcttttctaattacatgtgcattgttatttaaatacagtcacacccatctctatgagcgtcatgcctaagactttctgagaacacctctgtaaacctaagaagttgttagggggactaattccaccttgattttttattcttgtcatagaacctttaatactgccatggttttaatgatagaggcttttataccaaacttgtactagtcatagtgtttatgtttttggaggaaagatttaacctctataccttagaatctcataacttgttaatacaataacagaattaaggtattagagtttaatgagaacgcatagtttaaattactattggtgaagtctcaagtgaggagctgcttcattgttgtttggtaatggttactggtttaatgatgattactggttatttttgtttcacttctggttattggtaatggttatttggtgtttgtgtaagaaagattttggcaattgtaaagatagtcttttttttttttttaattgagatgggggtctcactcttgtcaaccatgctggagtgccatggaatgatttcagctcgatgcaaccttgcctcctgggctcacgcaatcctcgcctcccaagtacctgggaccacagatgtgcgtcactacgcccagctaatttttgtgtttttggtggagacagggttttgccatgttgcccaggctgatctcaaatgccttgagctcaagcgatcctctggcctcggcctcccaaagtgctgggattatgggtgtgagccactgtgcccagcctaaagacaagcttttcatatagaaacagactcccgggtctttcgtaaggaaatatctgattaacttcttattttgtgactttatattagttaagcagttttaaaatagtaaaactaatttggctcttagtaggatatcctattatatctcacataaaagccatctcagataggtaggaattggcctcatgtatttaaagacctctgccctccctgtttccaagatttaacagctgccatcaggacagcggtcatagctaatcctgttatgccagtcttagtttaaacccattatcctttctcttcgttaagactgtcatgaagttcttcctttacttttcttatgcagggtgaatattccacatttttaatgtatttgggcctgttaacattctgcagtgaagccaagcagttggttaaaagagtcctgcatgtttttaaacagtttcctttttaaagcataaaatctgcatcttggctgggygcagtggctcactcctgtaatcccagcactttgggaggcagaggcgggtgattacctgagatcaggagttagagaccagcctgaccaatatggtgaaaccctgtttctactgaaaacacaaaattagccgggcatggtggtgcatgcctgtaattccagctacttgagagactgaggcaggagaatcacttgaacctgggagacggaggttgcagtgagccgagatcgcaccactgcgctacagcctgggcaacaagagcgaaactccatctcaaaaacaacaacaaaaaactgcatttcctctggagtaaaaccagctttttgaatctgataataaaacaaaagctgttttttcctgctctctactaatagaaagtctttattaactttaccttactggttttgttagtacagtgactagtgactggtagtaaatgataacctagtggtaatgggagatcctgaagtctcctgaatcatcaatgacaggtcacattgggttcagtgcagctttagccttttgagtatgttttattgtaaggagttccaaacgccagccactccttgaaagatgaggtacctggtgatttgctgctgagtcactgaccgagatattctttaaaaatgcagatttcccagccccacttcctggagattttgactgagtgggtaagtgatgaccagagaattaccttttattttttcaattttataatttattattactactatgaggccataccaygtagacgctaccttttatttttattaattatttttattttatttcattttattttgagatggagtcttgctctgtcacccaggctggagtgcagtggcgggatctcggttcactgcaacctctggatctcggttcactgcaacctctgtctcctgggttcaagcaattcttctgcctcagcctcccgagcggctgggattacaggcacccaccaccacacccagctaatttttgcatttttttttttagtagagacgggttttcactacattggccaggctgatcttgaactcctgacctcatgtgatcygcccgcctcagcctcccaaagtgctgggattataggtgtgagccaccacacccagcctatttatttatttttgagacagtctcagctctgtcatccaggctggagtgcagtgaggtgatctcggctcactgtaacctccacctcccaggttcaagtgatgtgcctgcctcagccacccaagtagctgggaccacagatgtgtgtcaccacacccggctaatttttgtatttttagtagagacagggttttactatrttgaccaggctggtctcaaactcctgacctcaggtgatctgcccgccttggcctcccaatgttgggattacaggtgtgagccactgcgtccagcaggaagctagctttaaaaaatctcccttgcatctttattttcaaaaagctccccaagtggtttttatttatttatttttttgagatggagtctctgtcacccaggctagagtgcgtggcatgatctcggctcaccgcaacctctgcctcctgggttcaagcaattctcctgcctccgtctcccaagtagctgggattacaggcacgcgccactgcgcccggctaatttttgtgtttttagcagaggcagggtttcaccctgttggccaggmtggtctcaaactcctgacctcaggtgatccrcctgcctcgacctcccaaagtgctgggattacaggcttgagccattgagccaccgtgcctggcttcccaagtgctttggatgtgcagtcaagtttgggaaccaccgttttattgcattgatactctttttcagggtggggggggcattatctcctgtacatcaggccccatggaactttgaaaattggggttcacttttcttcccttttctttctttcttttttttttttttgagacagagtcttgctctgtcacctaggctggagtgcagtggtgtgatcttggctcactgcaacctccgcctcctgggttcaagcagttctcctgcctcagcctcccaagtaactgggactacagacatgcgccaccatgtccagccgatttttgtattttttgtagggatggggtttcaccatgttggccatgctggtctcaaactactgacctcaagtgatctgcctaccttggcctcccaaagtgttgggattacaggtgtgagccaccgtgcctgacccgcttttctttttttaatttttagagtgaaattatgcacattgaaattccttataaattggtagtccctctaatagaatcgttatgctatccaggatgtttgatttgctagaatagcccatttcctagtcatgacagataacaaagagcttttataacttttatgtaaattgctttacagtgaggcctcctctgctgtattatctatcaggagtcatgagggagggtttttggtgaaagtagcttcgtttatctcatgagtggacaaatgaatgataatgtggaaacaactagaggtctgaataggtagttgaatctagttatgatcatcagtgttggatggcagagatgcctgggaattctctgtatgtcaaattttagaataaagtcagtttgcctgttttatttctacacagctgaagcctttattgaaaataataggtgcgtaacaaatagttaataaaatttagtcagcagccgtttgatgagttcatgggaggaagaataattgctgaaatatagaaccatctgatttaaaacagattcaggcactagatacgttatccctaacgtagtttgtttgtatagacaaacctggttttgaattctgactcccccacttcctggctgtgctaccttaggcaaattacttaacctctgtgagcttcagttttttcatctgcaagatgaaaatacctggtaggattgttatgtggattaaaagggggaaaatatgcaagggaggattgaaagagagaaaaatatgttttttgtatattgtaagcaactcaataaacgtcccttctcccacttcctcacacaatttttattctgtaggcttaagatgcttttctaaatccagctttctctatatctctttccaggaatatctattcagtcagctcttttagaaaatgtatgaaagagtgaggactaaagttaagaaccagagaatatgggtaagaagaatgagtcacaggacaattagcaacrctttaaacaattttttagaatgagtggagtgttggcatgtacccagagttactatctgcaggaataaatgaataacattacccaaattctgccatctgtatttggacggtagcccagattaggctaggagcctttgagggtggcctcattaagtagcacctgacatccatttctttcattatcttcttttctcccttttggtcttcgtttcttgttccctgtctcctccttttccctcttttaaagctgtccttcctttagacttgccaatcatcatcatagatgcaggcccagtccctggaactcgaggctaaaagaggtttctggttgctaacacctgtctcctagctaaatgaataagctcttttgtgggcaggatgttaaaaaagctgattagtacaataccagcttaaagggcctattaatgatacagcatatgtaaatcacagtgatttaaagccattttagagattaatttcttatatatttattttctatattgaattatgatgtcagttgaatttttacatctaaaccatgaatctgtttattacctaaacagactaatttctttcatattgattgggaatcatttatattctaaagaagtttccacccttaagggcctttgtattgtttggcaaatgtctaactagtgtgtaatacaattgaagttttgttcactgcgctgctgccataactagtttaatttctgctccttatatatttctgttggcagctggaaaattaaaatactagatgttccataaaactgattttttgaggggtgattttactgtcatttgaatggacttaggccccagggtacatttttttaagatgtcttaytcaactttcctgtaatagtctctctctctttatataattaatgtattagacacataattggctgtttaagcattcagaagagacaatgtttggccttttacccagagattatttttttctacatctcttgaggaaatgtgtgccatttttggaaactcctaagtatattacagttacactagcacgtgaatttttgcaaagactagagaatgaacaattcccaaatcgttctattctttttagatcatagtgtttccaacctgatgtgaaaggagaaaggctgtgatgtgatacctagtaaatcctcctcataatttttctatatgtttcacagaaatatatagtcttcaataactgaagttactctcaaggagactttacatttaattactcaatccacacttaatttcctgcaagattcttggagagacactcaccaggctactgatttcatggagttataacctacacaggtttttatctctgttaaagctactaacccccactttttttttaggttgaaaagtgaccttggtctggtaatttcttcattgtcytctcctctaaaaagatacagcaaaaccttcttgctctctcagcagcgtttttcaactgctactaccgccatgtgctgaatttgaatttgagcacacttcagtgtatgattttgttgagctaatgttatctgactttttaaagctgccgctctgcaatgctacagttaaacctacattttctgttttcatgttcacatgccttttctagaattacatataaaaatatgttttcattatctctgagttgtggagtgttccctgggacagtcacttgtttctaccagtggctagttctaagagtaggggaaatccacctggatttgaactacttggcagccagtatgatctgctgaaacattttaactgtcttggtcctttttaaagaaatgctgcctactcatcttgaaacttrcaggaagttaggccaagtggaggctctgctggcttctgagtggttaaatgcaacttattagtgatcaacaccattgtttatttgcaactgctggtggattatgttaaaagatttgaaaggaaaaaaagcttttcttaagtaaatcgtgcatcctcctctcccacctcaccctcttcttgttttactcttcatttgctttggaaaatctttccagtcttggtactgatcacatgtatatagtcttagtggcaattgaatcaacgtattttatcctaaaatatacaaaaaactatgtgccctaccctctgcattttctgctaatcctcccatgcttttttaccttcataatgattaaaatatgtgcctgagaaataaccaagcttcatcctctatcaacttccaaccctcttctaggtcttgcgtcagtagatgcataaccatttgcagttgggttggattgtaccatcttaactatactaattattattttacatggtgtggaagatcagccagagcatatgctttattctaaaatgctgggcaaaggaatgttctaatttggagagagaggaaggagtgttttctagggccttagcaggagtaggtccactgaaattcagctagtttgaggaatctggatttttgtcaaggggtggaaaggaatagttaggggctaaaattatgtgcaagcaggggtgggaaggaataatttatgagatgaggactttcccagtccacagtggagaattcttaatcttccagattctcttatgtttgtctacttatcatatactgatggaagagtttgtgtaatccttctgtgtcagagctaaagtataccttagccattgtttactgagagggtgggaagagggatgtcagaatattctcagcttgtcaaagggcattccaccttcctgttgtacccttggccatatggttgaatccagcacttcagatgattctgaatcatccccaccactcccattgatstagttcagtgtttcccaactctgaaatgttgacacagttagagaccagaagcttgaggaatagtgactgtgagcccaccaattaatgggggacattaaaatgatagtagttctgcagcttcacctctagatgatcttcatcagattcttaaattgcatttacttgataaaatcctcaccacagcacatcaacatgtctcttgcactacccaaaagcagtattaaaaaggaaaatacgttgacaattactatctaattaggtttttatttgagatacaggctatctatagctctgttgttatttgtggaaatgctagcaaaaaaacagactgaaatctttctccttatgttgttgttttagaaacaacacaaacaggttgggcggtggctcacgcctgtaatcccagcactttgggaggctgaggtgggtggatcacttgggttcaggagttcaagaccagcctggccaacagggtgaaaccctcgtctctactaaaaatacaaaaatttgccaggcatggtggtgcgtgcctgtaatcccaggaacacaaacataaaaataagcctctagttttatttgggagggatcgatataccatattcgagttctgaatatcgtgtcaggaaagcagtttttgatgccactagttaaatgtttgtgtgttttgatataccgttggtcttcccaaccaaacatcactttttttttttttttttgaaacagtgtctcactctgtcacccaggctggagttcagtggtgccatcttggctcactgcaacctctgcctcctgggttcacgtgattctcccatcttagcctcctgagtagctgggaccacaggcgtgtgccaccacatccagctaatttttgtattttttgtagagacggggtttcatcatgttggccaggctggtgtcgaactcctgacctaaagcgatctgtctgcctcggcctcccaaagtgttgggataagtgctgggattgcagatgtgagcctctgcacccagcctatccctttttaagatggggaaaaatggaaatttgctgttatgtattacacatattatgaaagcatattagaatgtattttctgggccgggcctggtggctcatgcctgtaattctggcactttgggaggccaaggcaggcagatcactggagcccaggagatcaagaccagcctgggcaacatagcaaaaccttgtctccaaaaartacaaaaaattagctagatgtggtgttgtgcacctgcagtctcagctactcaggagtctgagttgggaggattgcttgagtccaggagtttgaggttataatgaactatggttgcacaactgtactctagtgtggacaacagagtgagaccctgtctccagaaaaaaaataataaaaatcaaataacttctttattggagattacatacaaatcgtgacctttttttttattcctraagtctttagtaaggttatatgtttactgcaatagatcttaaattttactatgatcaaaaatctcctaggtgcttgtaaaaaataaagattcctggttcctagcccagccctacagaatcaaagtgtttgggatagagatgtgggattctgatgtagtttatctgtagaccccacttggagaaagaatttatgtgagaaagaaccacacataaaaaaaaagattgagaaatgctattattttgcagaggaggaatttaaagcacagaaaagtcaagaggctcagacttaactaggatatccagctagttatttgactcttgcagaccagaagctaggttggctgactactgtggatttgtgctctttccattagattatagtctggggtgtgccatcttttggcctccctgggccacatyggaagaagaagaattgtcttgggccacacataaaatacactaacactaatgatagctgatgaaagtttatgaatttgtgttgggcccggaggccatgggttgatcaagcttggattatgccagggtgcctccttgctggtttatctgattgcctttaaatcagaagctataagataatgagggcaaaggtactttgattccttcagaacaataatgactgaactggcacttcatagtgtgaaaagtttgtgcttcttaaactatctgtggtgaaggaccagctttgtaagggtttcccttcacccctaatctgttgccagccaataattgtgtaaagtacaagaaaagggaatcaccagaaaaatcatgcacttggatgtcacagcaatgtcaagcactagaaaagtttctaaatgcttactgtgattttctgtgttttatcttgacgtgaatgggcctccagcagtctgacacacacactttgaatagcattgttctaagtggttcttaggacatcttaagaacttgatatcagaggtccttgatcattttcttcctcatgccacctataactgaagctaccatctgagagctcccattcctacctggggagagaagtttcatgacttggtggtttcctaggtcagaaccaaagttgataatacttagggactagttaaggaactatatagttaattwatttaattattataaataatttatatatatttaatatatatataatttattttaatatattttatttttatttttaaaaaccagaacatttattgtgttactaattgttgaaattcttaagatgaactggatgctgcagcagctgccctcttgggtttaggtggtgttctttcacagaatccatgccygaatttgctgtatacaatttttaagtgcctcatttgaccagttccagtggtagtttgtcttttagccttggcactccagttatacttcctcttgcgcttggcagcatagccacatttgccacaggtcgacttctgaaggtggtaygtcctgtcacgtcttattgtgatgctttccaaacgatgatgttcccttcatcatctggcttctgttactattattattattattattattattattattattattattatttgagacggagttttgttcttgttgcccaggctggagtgcaatcgtgcgatcttggctcaccgcaacctccgcctcccgggttcaagcaattctcctgcctcagcctcccaagtagctgggattataggcatgcatcaccacacccggctaattttgtatttttagtagatggggtttctccatgttggtcaggctggtcttgaactcccgacctcaggtgatctgcccaccttggcttcccaaagtgctrcaattataggcatgaatcaccacgcccggcgtttttactattatttttaaaattactgctccttgcagagcagggctaccctataggcaatgtgcccacagtagccaacctttaatatatttaagagtaaattgaggccgggcatggtggctcatgcctgtaatctcaacacttttggaggcctgaggcgggcggatcacttgaggtcaggaattcgagaccagcctggccaatatggtgaaactccatctctactaaaaatacaaaaattagccaggtgtggtggcacgcgcctgtagtcccagctattcgagaggctgaggcaggagaatcccttgaacatgggaggtggagattgcagtgagccaagatcatgccactgccctccagcctgggagacagagcaagactccgtctcaaaaaaaaaaaaaaaaaaaaaaaaagaataaattgatagaatttgcattgggtgcttgtattgggaggcatattcccctctttttgactaaatactggaaaggagtttctaacttcttggcctgtaacttaactcacagttaagatgcttaaagatgggagacagaaaataaaatttaggggtgtgcaatttcttcgagacgcttttgtgtttgctttttagaagccttttgtgaatagtctacgaggatgcattattagtttttgtggttataatgtcaaaattagtgttgatttggagcaggcagggaaatctctccatgcatgcttttcatcctggtttaattgcttagttggatgaaatgtcaaacttgatagattattggagctgttattttggtagttaaacaataatgaaactgtttgaatgtttttggagaacactgcttcctgtgtctggactttgcactggagaaagtttcaattgttcacaagcaatactggttagaaaatgcagcttctgtggctcctaacacagctgtctaaattactagctatatgggggcctttggacaagcactgcttaacacttttggaaacaatttgtttctgattccaaaaatgtcgatggtcattccctgaatacttgagaaaactagaaatgggaaaaaggtattgcatgtgtctaggttatgccagtcaagtgttttttctttaagcatctctagaacaaatttacctttttagctaaggataagaggtttatggaaatgttgtagcagccccctgggcctttctttcctccttgatgactgttcagcagggtagcatgttgtcagcttgtgtgccagcttacagagggcttgcgttattataaccttgattaggaaagagggatggggaacaggagtgagaggacagatgtttttgaaagtccctctgcctgctatgtgaaatcttgaattttcactttgaacttcactgttgtttggtgacagatgttataaaactgtctttacaaacaatcccctttcctattgaaattgtatgttggccacaggagctagggaagcaytgggcatgttcagcaggatttatttcactcattccactgtgtcagatgatactttttctgaatgaaattgtatgcattcttcagtgggagttaggggaaggcttattcttgtctaaaagtatgggagaatttgtgtaagactgatcaaaagactagcacttcttttgctatgtgatacttctctttgtgccatattttacctgtaggaaaattaccaacagttattatgtgctctccaggtgccagggactttgctgtattaacaagtttaatcctcctaacaatcctatgaggtgtgtaggtgttatctgtgttccacaaatgtgaaaatgccgcacagagaaattaaagagggggcccaaagcctcacagtgttggaacccaagtattccagctgtcaaggttgagctgtcaactactgggtgacagctgcctcacactccgtcaggatgattaccttttgaataagtctttacaaatatgtcggctgcagaagtaaccagtccagaatgaatgaactctcaccgcagttttagctcagcaagcagtgcctgctatcagaaacatccaaaaaccacagcaattagacaaataaattgtgaaagatgtggtttccaggtaagatatgtgacaggcttcttaccgcaaatagtttttcttacaaaaggagaaagactggtgggagagatggtggaaaaaatgaaaacaatgtgtcttttatgattgtctgggcccatcctcacaggacttcatatgtagtgaaggcagaatatttacctcaagcccagatgaccaacttttactttctacactgactcaggcttcttcctaaaaatggtgtttcaccatttattccactaacatcactttttaattcttaaaataaaaaagaatagttttattcataaaactacatgggcctacttgtgtggaatgtgatttaaaaatgatgttagcaatacttgttacttattttactagttttagctttgttagtgctgaaggatgttttatagtttattctaaaattgtaaacgtttttgatgtgtaagccagtcacccttaaaagcacatttggctaaataaataaagcattaggttagagaagagttcactggtggttattttttgttttgtgtgtgtgtgtgtgtgtgtgcgtgtgtgtctgtgtgtggggtcttcctgtttgtcaataggccttcccaattaattgaattctacataagatacatagatgttagtgccccatagggcctcatcttgtaagtgatgttagtggagtaaatggtgatataccattttcagtaagaagcctgagtcagtgtagaaagtaaaagttggtcatctgggcttgaggcaaatattctgccttcactacatatgaagtcctgtgaggatgggccagagaatcatagaagaaacattgttttcattttttccaccatctctcccaccagtctttcttcttttataagaaaaactatttgcggtaagaagcctgtcacatcttacctggaaaccacatctttcacaacttatttgtctaattgctgtggtttttggatgtttctgatagcaggcactgtctgctgagctaaaattgcagtgagagttcattcattctggactagttacttctgcagccttctggcccattactcatggctttggtgaggctcgataaaaatattgtgatggatagggcacaggtagtgcctgaatgtatttcagatagttgggccaacaaccaatctatgcttaaataatcatctctcctgcatagtagagactgcaaaatagtatgaaacatgctatactttataaacattttgccttttttagctccccgtagtggctggacagttgactgaataatttcatgtttttttttttttttgagacggagtttcactcttgttgcccaagctggagtgaaatggcacaatctcagctcactgcaacctctgcctcctgggttcaagtgattctcctgcctcagcctcttgagtagctgagattacagatgcacgctaccatgcctggctaattttgtattttgagtagagacggagtttctccatgttggtcaggctggtctcgaactctccacctcaggtgatccacctgcctcggcctcccaaagtgctgggattacaggcgtgagccaccacgcccgaccacttttttttttttatactttatttttaggtaattrtagattcacaggaagttgcaaaaacactacacagttcccatgtacccgtcacccgtttttctcccattggttatgtctcatttaaccatagtacaatatcaacaccaggaaactgacatggtgctckgtgtgtgtgtgcatgtgtgtgtgtgtgtgtgtagttttctgctgttttatcacatgtatggatttgtgtaactgttctaccaccacaaagatcccccttgtgctactcctttattatcatgcatatccgttttccctactgtcctaatctctggaaaccagtaatctgttcggtgtctctataattttgtcatttcagaaatattatggaaatggaatcataacagtatgtgacccaatatgtgaccttttaagactgggttttttgttttttacttttatatgcatagaacaattggaactttttttttttttttttgagacagtgtctggctctgttgcccaggctggagtgcagtggcgcaatctcagcttactgcaacctctgcctctctagctcaagccatcctcccacttcagcctcctgagtaactgagactacaggtgtgcaccaccacacccagctaatttttgtattttttttatagacagggtttcaccatgttgcccaggctggtcttgaactcctgagctcaagcgatttgtccgcctcagcctcccaaaatgctggtattacaggtgtgagccactacacccagcctcgaatgtattttttgtagagataggtctcactgtgtttcccaggytggtcttgaacccggcatttttcacttagtgtcacaccatccatccaagttattgtgtggcagcaatagtttgttccttttatctctgagtagtattccatggtgtgtatataccacaggctgtttaactattcaccggaagggcattttagttgttaccagtttggggctattacagatgaagccataatgaacatttgtgtacaggtgattgtatggacacaagttttagtttctttgggttaagcatccaggaatgaaattgctggttcttaaggtaagtaagtgtatgttcagttttccaaagaaattgctaaactttttttttttttkgacagtgtctcactcactctatcacccaggctggagtgcaatggtgcgatctcagctcactgcaacctctgcctcctgggttcaagcaagtctcctgcctcagcctcccaagtagctgggactacaggtgtgcaccaccactaccagacaaattttgtatttttagtagagacagggtttcaccatgttggccaggctggtcttgaactcctgacctcaagtgatctgcccacgatgtcctcccaaagtgctggcatgacaggggtgagccaccgcaccgggccaaaattgctaaattcttttccagagttgctgtaccattttacagtctcaccagcagtgtatgagatccagtttctctgcatcctcaccagcatttgatattgtcatcatttttaaatttttgttttttttttttttttgagttggagtcttgctctgtagcctaggctggagtgcagtggcataatcttggctcactgcagcctctgcctcccaggttcaagcaattctcctgcctcaccctctcaagtagctgggactacaggcatgtgccaccatgcctggctaattttttgtatttttagtagagactgggtttcgccctgttggccaggctggtctcgaactcctggcctcaagcaatttacctgccgtggcctcccaaagtgctgcaaatacaggcatgggccaccgtgcctggccaccattttaaattttagctattctaataggtgttatatctggtttttaagttcatcagattacttagtaaaactgattcgactgacaaagatagaagatttttgagttgtatttttagctctctgaatgaatctgcctccatacagtgtcacagtggtctgctgactggctttttagcacccctgccatggtttccttgacagcaagaccctagacaaactctttttacccagcaatagatagcacagcactcccagtacagtactgcccatagacaaataatacaatttcaaaactgtgaatttcttgttaattttttatacttttgcctccatgactgtagctttaaatgtactcaaaatttggcttccaaaggccctaaaaactttttcaaattgttttggtttatgttatcaaatggtcttaggtactttatttctaatacgattaacttaaactgctcacacctataatctcagcactttgggaggttgaggcaggcggattgcttgagcctaggtgtttgagatcagtctgggaaccatattgagaccccatctctacaaataataaaagaattakccaggcatggtggcatgcaccagtgatctcagctactcgtgaggctgaggtgggagattgcttgagccagggtggtcaaggctgcagtgagctgtgatcacaccaccgcactccagcctcggtgacagagtgagaactgtctcagaaaaacaaaacaaaacccagctaaaatagcataaagtagaagttagacccccatccctactaggaataactgctattaaatggttttagtatatgtgtgcgtgctcgctcgctcttttgcacgtgcgcgtgctctccctctctcggtgtgtatgtatatatatgtatgtgtgtatctatcatatataattaaatatatattcccccctgctgttcacagtgctttttttcaaatgggtaatgtattatggagcattttttaatgtgaattttttaaarcatttaggacctgggatggagctttgggttcctttctccaacccttgtctgttctgttataaaagggatgagagaggtacctttgaaagacctaaagaaaatacgttttcttccttgttacatgggtttcagttgaaataaggttttagctttatttgtgagtaaatcagtagaatactggatgttaggatgcatctctccactttattataaataatgcaaggctgattttatgatgtgatctcttgcagaactttgggggaagtgagaactgtgagcacaataatcttcagagaatgcacagtcctttgggtatttgtctactcatcagctgcttagtcagatggagtgttttcctaagtactactgaagtacacagttcagtctttattttgaaatctctccttctgccttctctccctcttccattactttgattaccttgatgggacattcaagctgtgcagtcgtatccttttatttctatagcctgcagaaaccaggttgaagattaactgtaggtgaacaggtaatcttatctacttggctagaaatcacccttcaagatgaaacacgtgttgacaaaggccccctagacttggggacatgaacaaaggtaagttaatcttggggcattattagtggaaaccagggtagacgtttaggaagtttgacttattggaggcagggcatgtgtgtcagggagacagagcatgtgagtgtgtgtattaggagaagagacgaattcagaggtatacagaaaagaagaatgatgaattcaggcaatcttcagagttgaattacagaatcttttttctgagagtatggttactgcggcaaggtagtaataggacatgagcctgctaagtcacttcattatgaagctattagaatttaggtgatggagtttgatgacaggggtcttttccctgcccttctactgtattagctgctcagggaaaaaaaacagaaaactaagaaatagccttatatagaaaattatacccatcaaatggttccaaggtttctgttgctgggtttctgaaatgagctgcccaagatagcagtttggtcatgttgctgacttcttgctgacttcctttctcctcctcctcctccatcgggtcctcaggctgggtcctgacccctctggattctttcttttcctgcatgcttgctactttttcaattactgacatacaggaacctagtatttcattgtgcctgaggtaggcagttgctagcctcttgatattggataccttttctgagctatgaagtattacaccatagtggataataaagtactcacaattgcattatagaatagattctggtaactgcaccagtggggacagactgggttagcatgccctcacacaactggggggttgttttgcagcaaagtgctgtgaagcaggttgagcctcatgcagtgccagttcctgtatctaaatgtgaaagtggcttgttaaagattaaagggactgcctggtccttctggccccaagatggaatgatctctgccatggcgacagcctctatctcccaggagaggccattttatacagcacatttgtgcttccaaatgttactgtaagcctgcactggctgatactctggcgataagttgacatttgggcactctcaagacatatgagctatatagcatcccatggtttgaatttctgggcaaaattggctcatcaggaagtcaaaagcctctactttcaacctgttcctttgggttttctcctttgttttatttgactattctgttgagtcaaatgaactttaatttttagccataaaaattccattaagccccttgtatcatatccaggtgtgaaaatgtctcagtataacaagactgtgggtgacaggtgaaatccttaatggtagttaggataattgtctctgaaggcttgaagaaaataatggtccaaccaacaaagtgaatacagtttgtattttttgtggttcttgtgggtgagcggacttatgtttaggacctgctcagtgtgactactgttcagcttggaggtctttgaaaaaactttttttcattttactctaaacagtgcttagggaacatagctgtgtcctttttctcaaaacatgatccaaggcccatctgtatcagaattgcttggaaggccgggcgcagtggctcacacctataatcccagcactttgggaggctgagacgggcggatcacttgaggccaggagttcaagaccagcctggccaacatggcgaaactccgtctctactaaaaatacaaaaattagccaggcctggtggtgcatagtaatcccacctacttgagaggctgaggcaggagaatcgcttgaacccggaggtggaggttgcagtgagccgagaaattgtgccactgcactccaacctgggcgacagagcgagactctgtctcaaaaaaaaaaaaaaaaaaggcttggaagagagagatacttattaaaaattcagttttggccaggcatggtgactcacgtctgtaattctagcactttgggaggctgaggcaggtggatcacctgaggtcaggagttcgagaccagcctggccaacatggcaaaactctgtctctacttaaaatacaaaaattagccagacatggtggcatacgcctataatcctagctacttgggaggctgaggaaggagaattgcttgaacccaggaggtggaggttgcagtgagctgagattgcaccattgcactccagcctgtgcgatgagagtgagattccgtctcaaaaaaaaaaaaaaaaaattcagtttctggggcctccctccatgtctgctaattcagagtgtctgagggactgggatgagaaatgttcattttcaataagcacccctgttgattcttaagtacccctagagttaattgttgagtatcataaagtttacttcatttttcatgtttaatttctgtgatttattagatgataaatatttggttgccatcatattgtttttcttaaatactatgttctatagttaaaaaaaaaaaaaggctgtgaggtcactgaacaccaagattagaatttggcaatcattaattatcaacaaggtgagacaggcactgattcctggaaatgtgcatttatccattcaccgacttctcagttagaaaaaggatgtggacacaagtaagattaattttgttaaaaacaagaaatgtgcagtatcatttaggatgctgggggtagggaagtagataaaagggagatgttgagaggaaagagtgtgaagagagagtaaagcagtttgtaagtgatacaaactttaaaattttaactgaattttaaactaccaagtcatatttgaatatatgcttgttgtaaaaaaattcatgatttttggggggtaatttggataaagctaaacatagctatttgatctttattcccattacagtgctctccctgctgtgtgcatcctcccagatcttctgtatgtatttggtaattttctgtggatttggaagactacagaatcctgagaaatggatattttaatttctcttttgaaacctgcttattgtttataatgtcaagatctattgcagaaaagamagtaaatctgggatgtcaatgacatcacatatgtctgttcaaatgaaacaatgggcacatacacatatgcacactcattaaatatctgttgagaccaccctattaaaaaaagcataaatagttttgggtgttaagttacttgagttttaaaataacgtattttctgtttttgttgttttttgttttgagatggagtctccttctgtcgcctgggctggattgcagtggcgcaatctcggctctgcaacctctgtctcctgggttcaagtgattctcctgccccagcctctagagtagctggggttagaggtgtatgccaccatgcctggctaattttaaaataatgtattgaaagaacttagtcagaaagccacagttattatttctcccatagcctcatattctcataattttcatgtaacctcataaatcctcaagtgcctgaaaccactagttcaaacgagtacctttttaagctctaaaatgtaatcctcaacctttccactttaaaaggaagaactaggatggagtgtggctataatttggggcagttggttaaaactgtatcagagtcccaaagaggggaatgataagctgcagcagctctgttcacttgctcaatggtgtttctcttagtcaasttaggagttccatgcctttggccttcaggctgctctttatatagttcgtatctgtctcctgggcatagtactgtctggattttctctttctttttttttttttttttttgagacgaagttttgctctgttgttgcccagrctggagtgcaatggcacaatcttggctgactgcaacctctgcctcccgggttcaagcgattctcctgcctcagcctcccgagtagctgggattacaggcatgtgccaccacacctggctaattttgtatttttagtagagatgggggtttctccatgttggttaggctagtcttgaactcccgacctcaggtgatccrcccacctcggccttccaaagtgctgcaattataggcgtgaaccgctgtgcccggccctcttatttaaagttcgcaaatacagaacaggtcaggagcttttctaatcattttttttttttctgaaggaggttccatatttgtctgtaccttgagagttgtttcatactagaatttgtaacttatcatcaactacagaaattttttttaaagtgtggttgaagagataatggttgtcagctgctataaagatgtgtttatcattcrgaaaggactaattaacatgtactatagggaaacttctttaaacaaagccattttctgaaaggaaaacactgaaggggaggaaataaaacagggaacattttataataccttatcaaagctcagcgtggctatcctactggaataatgtaattaaggagaattaagtgagttggataaataactttttaaaactagccccttgaatagaaaattaagtagtatagtttttaaactcaaattctgtctgcacgtacattttaattaacctaacattattgaatgacaagctgagttggcagctacatccagagttcatgccatgtgagacctaccttaaaggatgaacgaagctgggtgcagaggcctcaaatgccctgctaagaaatagctgatggccttggggaactgtcatacattttaagcaggaaacagaaggatctaataggaactttagtttctctcttgtcaaattaaagcacacaaaaagcaaggacttgatcttttttttttttttttgtataacaccaatgtcaattctagcctgtcagggcaaattcagtaattaatagctgttgatgagccagtcattctagattgattttttaaataagcaggctaataaatgagaattracataaatttagggatgtctcttttcagagcaagtgttaaggtgattttcatagtcttctgtattccctatgcatccagtaggtgtgatggtaaatgatttggctttagcatagagaatgtggcagctgattaaaaaaaaaaaattccagtgcatctatcttaatgagagaacttgagttgtctraagaaatagagaggtcagaggaggcctagtgggaaaaaagaacaatgagcctggttagaactgacaaaaattcaccctaatgatttgactggctaatgatgactgggcaagttccctgagtccactgacccagatgttctaatttgtaaatgcaaagtgacttatttatcagcctcctggggaaatcttcagagctgtgaacctgctatgttcagtaatcttgctggccccagccccagcctgttctcagatgaaattttagaaactggccactggaactttttgggtaagggctctggaggtggccaagttaccagtagtgggggaatgaggtttacctgcccccagtaatcagcacttgatttaaaacaatcagtgagctgcctcttctttcctaggttgcagttgactgcggttggttcaggctgagttgtttgggaagtacaaattttgcccagcgtgagtcagcactgccctgggtaaactccctgctgtgttgcaatcttgcttaccaaagatacatccccaggcggcaccattcacttcacatgaaagccgctgctcttggttcctgagatgatctcatctgaacatggctccagcgacctcagccacaggaactagagacagcttgctttctgtcgtggcaatgttttgaaactggcaaaatcaggtaacctcaaactgttttyttaagtttcattagctagatgaagctgcattagaaactgggaaaatcctgtyttcagaagtgagtcaggttttttttttttttttttttttttttttttgagacggagtttcactcttgttgcccaagctggagtgcaatggtgtgatctcggctcactgcaaccttcacctcccgggttcaagtgattctcctgcctcagcctcccaagtagctgggattatagatgtgcgccaccatgcccggctaattttgtatttttagtagagacagggttttgctgtgttggtcagtctggtttcgaactcccaagctcaggtgatccaccctcctcagcctcccaaagtgctggaattataggcatgagccacggcccccggccagaagttttctttcatttgagttstggatgtggagttaggtccaattaaatcactgattatataaatcttagaaaagtaaaacgttaggtttacagctttatccgtcatttgctcttgtattttgtttttttgtgtgtatcttgtgagaaacactttagtcaaactaagccattgttaaaggaaaagaagtgaaggcatttggttgccttcctaataactaaatattgagttgtggagaacactgtcttatcagtgagtttgttcccatattcctttctgaattaataggaagaacctccctcatctctaattctactaggctactactctatctccctcctgcttttcatcgccaaacttttgagtccttcacctaatcagactatgatatctctaggtagtcgtcaccctccaaattacgtttctgctccttataattccaacaaattgcccacgttctctttcacctcagaccttagcatatgtaagcgttcttttacacaccttccccaagcttaatctggccaactggtttcagcctagaagtcacctcttccaygaagcctcttcttacttaccagggttgagtactcaggagaacctggtatttactccaatcatagtatgtattgagaatcagggtctgctttgctagaattgtatccatggtacgttgcacatagtaggttctcagtaagggtagaatgagcaagagcctgtactgtactttctcaactctgatcctctcatcaactcttttttttttcttctgagaggaatcttgctctgtcacccaggctgcagtgcagtggtgtgatcttagctcactgcaacctctgccttcctggttcaagcgattctcctgccttagcctcctgagttgctgggactacaggtacgtgccaccacgcccagctaatttttgtatttttagtagagacagtgtttcaccatgttggcgaggatggtctcgatctcttgacctcatggtccacctgccttggcctcccaaagtgctgggtttacaggtgtgagccaccgcgcccggccttgttcattctttttatgctcacatctttaaatgtgctaaaccctgttgattttgttggagtactgtttgatgtgtggcttttcttcattcccactgtcattgccttaatttaccagaggtcaaaactggacgtttaaagtcaggctgggcacggtggctcacgcctgtaatcccagcactttgggaggccgaggtgggcagatcacctgaggtcaggagtttgagaccagcctggctaacatggtgaaaccccatctctactaaaaacaaaaaattagctgggcgtggtggcacgtgcctataatcccagttactcaggatgctgaagcaggagaatcacttgaacccaggaggtggaggttgcagtgagcgaggatcacaccactgcactccagcctgagcaacagtgagactccatatcaaaaaaaaaaaagagtttgagaccatcctggccaacatggtgaaaccctgtctgtatttaaaaaaaaaaaaaaaggcacgccacgcatggtggccagtgcctgtggtaccagctacccagcaggctgagaaaagagaattgcttgcacccaggaggtggaggtttcaatgagctgagattgtgccactgaactccagcctaggcacagaagaagactccatcccaaaaatcaatcagtcagcctaagggcttaaaattttgtgtgtgaatacttttaggcaccatcagagagaaggcctgtactcttcaaagattacggataccaccattttctgacatcttacacactgaagacttagcattttacctgcattgcctctaggaatttgagtttgtaactcctagttcagacccttatcaaatggccactcctccataagtctttccttgctcctatcttctccatattgttgcccaagttatctttttaaagtccacatctaatcttttcatttaaggtgccatttgttccctgttttccacttagcttgacttctaaaagctttcacagttggattctttcctacatgttgctgttaaccatctcatctccctctcccctggccatttctctcctctccagcttcactgaacttctcatgttaacattccatggatataccatgtcttttaggactctgccttttcccaatggactctcccttctctaactggcaagatactcatccctcaggacacttagttcatatatgcatcttctctgacttctctgtcttttctgacagacagcactgtctgtctcttccactagactgttgagttctttgactgaacttggtgtccctggactagagcttggcaccatcagagagagtggctgacgtggatctccgggctcaaaccgttattctttgcaatattagaagcttttttgttagatggcatggtttttcattcctatttgatgaacatgagcccatggctgcttattttgtatgtgttacctgccaccatcaagtaatcattcaaagttaatttgaagatttaaagggtttgctgagatctagtcccgcaatatcacgacatttttatggtgttttacaaaattatttccctcatatggttttatttgcgttgggtaggctttatttattatccctattttaccagtgattataaagctagtctgataccaaagcatatatacatttaggtaagactcagagagaaaacatggttcttacactgcattaagcagctggtttgtctcttaatatagtagttaaatatactctatcaggttccacagaaatggtgcctttgctcgataggcaagtgctaacggtcttgccttttacaaggccactttatcatcaaggtaggaggaggaggtactctgaacctgcctgacctatgggaaggccctggttgtggttagagaccttgattgaaattaatggtgtgcgtactccaacctctcaggtttttcttttatacttcaaatatctggaagttgtgaaaacctgctgccctggtggagtatcaaaccaggctggtgagtgaaagcggtcatcccaaaatggagtaagctgagtgttaagggcagaaaaccttttacagttatagtaagtaattaactttttagatcacttcacaacttttggagtgctaaaatgccatatttgggactatgagaaattccattataaaaagctgaaccattagagctaggaaataatctctgttagatattggcatatggtgttcaattttgggtctctcatacttgagaggataattaaaatgattaaaaggttgaaaaacaggtcttatcattataagttttaaaaaggggggaaagattttagcctagagaaagaaaagctaagagataacttcattatcatcttcaaatacaagaatagttttgccagggggatttttattaattattcttcatgaacttcaaagatttaagaggaaatggtcttaaattgaaggaggagcaattttgatgaatacgagaaagaattttttgatcatcaaagtggggaaatgtttgaatgactgcccaagagagtgttgaatttctgactgtttcagttgtctattgtgtgacaaattacccgaagacttttggtggcataacatgacaaccattttattgcctatgattttgtgggttagtaattcaggaaaggaggacatatttttttttgtcccatatgatgctgattgagctggaggatccaagaaggctgcacatgtctgtacctttggagctagctgttggctgggatatcttggttctctgtgagttctctttcttggtctctcatcacttataaacctatatcgagtggccgagcgcagtggctcatgcctgtaatctcagcactttgggaggccgaggtgagtggatcacctgaggtcgggagttccagaccagcctgaccaacatggtgaaaccccgtctctactaaaaatacaaaaattagctgggtatggtggtgggcacctgtaatcccacctacttgggaggccgaggcaggagaattgcttgaacacgggaggcggaggttgcagtgagccaagattgtgccattgcactccaacctgggtgacagagcgagaccgtctcaaaaaaaaaaaaaaaaaaaaattctagctcgagcttcttttacatggtggctgggccataatggaagctgcaggatctcataagacctaggcctggcagtcatacatcatcacttttgccccattctttttgtcagagtaagtcacaattatagcccagatacaagaggaggggacattgacttcacctctaaaggatagagggtaaaaatcacattgcaaaagggcatgcaatgtgattgggattattactaccaactttattttttgaaacagagtctcgctctgtcacccaggctggagtgcagtggcgcaatctcggctcactgcaacctttgcctcccgggttcaagtgattctcttgcctcagcctcctgagtagctgggattacagttgcttgccaccacgcctggctaatttttgtatttttagtagatacggggtttcaccatgttggtcaggctggtcttgaactcctgaccttatgatctgcccgccttggcctcccaaagtgctgggattacaggcgtgagccaccgcacctggcctaccaccaattttagatacaatttaccacactgaccttagagatttttcatgaaagaataatcaatatatgtttattaaatgggtagtttgkgcatatgatttacaaatttggctgcatatagagtcatctgggagctttttacaagcataagctcctaggtaccagaccagtgactcagtgtctcctgggggtgttgtgttggcacataagagacactctatgtcctttctttcaggtaactatcagtaaaatgagtatggtggggggggatagatagatataatatgtaaggcaagatgatatgtacattgagatagatctcatctctcctgcttctaggacttgattgaatcctatctagcatgctcttctttccagtctgcctagtgtaaattatatttcattaaatcagcccatcatcagaacagtgtttcttgatgcctctcatttttttctcatgttttctggcatttttccttcattactttttttttagttcataattcaatatttatatgattgtttgatgtataatagacaaaaatacatctgctttgctttcgagtatctaacatagtgtctgcctcataaaaggcactcagtaagtacttgttgaatgaataagtggttgattgaatgcatgattgaatgaagtgatatttgaatttagctttaaaggtgattggaattttggacaggtagagcaaatgaatgggaaatttattgttctgaagtggaaactggatcatattgctcatgtaatttcagaaaactggagaaactggtttgggaaaatggaagagttggttttatatctagtatgctaagtttgaggtatggaaatttagcaggcatttagaaatgaagcactgatctgaagggtgagattgattccagatattcacttttgggagttacctgactggagaatgtgaaatctgttcctttcacaaatacctggtaagctcctactgtgtgccagacagctatgttatagggaaggtgaactgcagtctgagaaggagccagtcttgtgaaaagagctagggagaatgtttcagccagaaaaggaacccaagtttgtaggccctggggcaataaataatttataatttttgaggaattgaaggaaggtgaccgaaggacagagcaaggtgagtgaagtgggagagctgcatgaggtaaagtggaaaaggcaagcagagcccacatcacatggggactttgtgggctagatagtgagtctagccttcactcaaaagtgtggtggggctgggcatggtggctcacacctgtaatcctagcactttgggaggctgaggcaggtggatcacctgaggtcaggagtttgagaccagcctggtcaacgtggtgaaaccccatctctactaaaaatataaaaaattttagccaggcatggtggcttatgcctgtaatccgtgctactcgggaggctgaggcaggagaattgttggaacccgggaggtggatgttgcagtgagccgaggttgcaccactgtactccagcctgggtaacaaaagtgaaaactctgtctcaaaaaaaaagaaaaagaaaaaaaaaaagggtggtgggacaccattgaaggcttaaaacagaaagtgacaagcaaagattctttttctaaataaaaggttaccctggctactctgtagagaatagagagtcmcaaagaagggaccagtaaggaagtgtttgtctcccttcttgagaaggatcatcgcagatagggcaggatatggcagtggacatagaacgggatagttgcaggatgcatttaaaaagtagaaccaggctgggcatggtggctcacgcctgtaatcccagcactttgggaggctgaagtgggcagatcacctgaggtcaggagtttgagaccagcctgaccaacatggagaaatcccgtctctactaaaaatacaaaattagccgggcgtggtggtgcatgcctgtaatcccagctactcagaaggctgaggcaggagaatcatttgaacccaggaggcggaggttgtggtgagccgagatcatgccactgcattccagcctgggcaacagagcaaaactttgtctcaaaaaaaaaaaaaaaaaaaagtagaagtaaaattcactagagaaggaaaggaagaaggaagagtatggagtacagaaccctagggcctatgtagggggcaaaagaaggaaccagggaaggaaaataagggagcaagagtggtcattgatgtcaaaggtaagtcaggctaccacgcttgcagtgggagccagtgtgggagaaggagtctgtaaggggaattcaagtgtatccagagtaagtgtgctgtctgatgtgtggcaagtcaatacccaagacctgggggcggggtttatttgttgggctgcagaatgaggagatgagagggaactgcaaatccgtcctcctgaggagtttggagctagggtttttaaggattttggagtgrgctggaatgtggagattgttgggtggtcagagagagaaaggtgaagtaatgggacccggagatgaaaaaactgtattatgctgattttatttctctctgagggtcttcaaactggttggcatcagctgttttaccagaatttgggatctgaaaaatatctcaagcaattcttaaaaaaaaagccttatgcttctaatgtcagagatactatctttagaaacaatagggwtgcaaatggtcagtatctagcgctgtgtgactttcagttacaaggaaatgtgtcaaaatccagcctrattaatgttttttttttgtttgtttgtttgtttktttttttttgagatggagttttgctcttgtggcccaggctggagtgcaatggcatgatctcggctcactgcaacctctgcctcctgggttcaagtgattctcctgcctcagcctcctgagtagctagactacaggtgtgtgccaccacacctggctaattttgtatttttagtagagatgggttttcaccgttttggccaggctggtctcaaactcctgacctcaggtgatccgcccaccttggcctcccaaagtgctgggattacaggtgagccatcgcacctggcctaatgcttaattaaagttatatttctgtccatagttcttggtaaccctctgaagacagcttcataatgaagaatttgggtaggttttgggtgcatggggcttcagggagtcatgaaggttgaggacataggaaagaatcacacatttatccatcagaagatcattggtgaccattggccgggcgctgtggctcacgcctgtaatccyagcactttgggaggccgaggcaagtggatcacgaggtcaggagatcgagaccatcttggctaacacggtgaaaccccgtgtctactaaaaatacaaaaaaattggccaggcgtgctggtgggcacccgtagtcccagctactcaggaggctgaggcaggagaatggcgtgaacccgggaggtggagcttgcagtgagccaaaatcgcgccactgcactccagcctgggcaacaaagcaagactcaatctcaaaaaaaaaaaaaaagctgttggatcggtgtttactaagcacctactctaagcctgtcactgtgttagtgttaaggatttgtgtgaatgacctcttttaggtacttcattttacagatgagaaaaatgacgcttagggaattaatcaccttaacaggtcacacagaaagaagactatgagttctgtctgacccaggccccatgctcctaaaccttgcatgacactgctctttggaaagccctatcaggacatcagctagagaggaatgaaaggtttttagagcccagtgatggcttaccccagctgtatgaatttgttagcaacccagttaaataaagtcttctgatttttctatagtaatctggcagtttaggaatggagaggtgggggagggaggggaagataaaagatagagtaagagttcagtaaattagaaaggggattattttgttgttcataagtgtaatgattggattttcatgcacatgtatgagatgtgcctccatcaagccttgttactacaaagtcagtgcattacccatctgatgtgggaaaaataaatcagaaagaggcctcagcttgtgggaatggtggaatgcaatggcttgtgttgttaagcaaaattgtgttttacagtaaatatttattgtggttcttttgatgcaagttatattgggatatggaggaaaatgcaaaaatggataagatggtgtatttgacctctacacggttagagaggaaggtaaagtgcttcactatagtgcttgattgaagggtatgacaggggtggaaggtggagaagtatgggaaagtattatacaagttagcttgtagagcgagggtggcattaggtagggctggccagggtggtgccaatctagcttctcaggatgacccctcaggattttggtcactgtgtcgtcagtctagtcttgggtcacaaaatgtattttgtggagaacctggaaataattagtcttgaagacaggattgtattcagacttgagtgattgagctcagaatggaatgccaatttattattttagaatgaaggattccttttccgttaacgggattctggaatttgttaggataattgcttttcaatatcaagagatctggcaatcaaatttaataatatcaagcttgcttggtgagcatggatttataagatagaatggtttgtgggggagaatatagttacaaaaaagattattgtttcccataatgcctggtattgtattaagtactttgcatacagtagggcatttcattgtcccagtgatcctcctgcaaagtaggtacaattatcttcaatttacaaatgaggaaaccaagctctcttcaagctgataagatgctgaactgagatttgaaccaagtccctctgcccctaagagcccctacccctagctgctactatatgctgtacccatctaagctttgtgaaataaccttgttccactgcagagaagatgttgtgtcacctatctctagtatttcttggctttgggcagttctggagtcaaaatgcccctccctgttttttctagatttttccagatttctttgttaaccagtcttagatgtggtcacattctttgtttaaatacccgtgtattaatatagtcatccaagcctttttgtcctcttcttgcwtttggtttggaagatactctgtctctttggaggaactttacatatctgtgcacattgattttgtgttgattttattatcttaattttatgggttaagtttttgagtttcytccagctcctagtccatcaactccttcctgtccccttcctcttccactagacttaaattcagatactaatgccaatttctgaatactcagtctggctccagtccacctatccaatttagacatggctctctggatcactagctattgccagttactcactgctcctgtatgatcttgatttcctacttgagtacccttgtttctgttgtgcttttggcttggaatgtcattcttcccatgaaggctccctagtctgatccctcactgggagtaatcacttcttcctgagtctcatagcagagaattctcttttatgtctcctttgtggcacattacactttctgccatctattatagttgtttgtgtacctacctatctcctactagaccatggcctcactgagcagatctgtctggttgacctttgtctttctcctagtatctagttcagttccctgcacatagtgggcattcaatatctattggatgaatgaatgaataactgaacagaatttcagrtttttaagtttctactcattgtttattatagattccctcccttttttgcttttcttcttcctttcacatttccttttctttcttttctattaacctgtgttttcccttgcactgactcactgaacttctctttaccacccccttttttttacccagattttgcctcattctctcctcattagcagtcactatgtgggtgtgccacatgctgctggtcagattttctccatccttttgtggcttgagttcccccatgaatcagatgagcagcataggaattgactggtgattacattaacatcttaataaaagaccatgtataaagaacagtacttaaaatttgtcagtatattgctttcaagagggaaattttccaatgcatgtttcaagtgaaagggaaagggaaaaaaaatcttccggtactggggaggtagatcagggcattttattcacagtgtgggatgtgggatgtcaaaggcatcttatttgaccaaagaaataatgcaggaaaccacagaaacttctgctaaccgttaatattgaatcctcaaatttttctacagctggagaaaacattagagatgaatgtagttcaaccttcctgttttccagatgagaaaacagacccaaagaggctaaatgacttgtccattaagctggggtatttgttgcccagtgtttacttctagaactgaatgtggcctgggaaaccaccaaatctttgaaagtagtggaaagttacacttgaagtggaggctttaggtgtctaaaattgaaggcttttgcaatgctgaaaagtagactttgtccagttggtagcaggttggatttgaggcagtgttcacgaaagggctgtttaactgtctcagtcactcccttctgggaatctgttccttctgcatttgaaaaggggccarcgtttaattattaaaacattttcaatttttcttgctctttttcccagccctcatattcgaagttttgtttcaggctttatttccttatctcagcactatttgtgttaagtttttattgcttaagtcagatgtcagtacgaagcatgggaaatccagaaagtgtcttagacactcatgattggtttttggtgcttgttaggtgaatcttttacctgactcatataataatgtactttattgtcactgaaatactgtctagtgaaccagttggcagcagatatgaaaggttacctacttgttgaaggtctagggtacagcggtggaaagagatcagatagcccaaaacaggaagtcaagtgcaaacaggatgtgtttgtctgctgtaactcgtgtgcctgtgttttgaaacttggtgctgttaaaaagtcaagacttctagtatttgagcttggctgaagaagtctccattttgggtttgaaaagaagctaacataactagtcctttacagcccttgcctttacccatatgcatgtctttcttgtagggaccattctttcttcctgggcatggttgtttatcctagtttatactgtactgcatccatatggtttataaaatgaagccactgaattgactgttgatgttacttttggtagatatgggattcagtctgtgtttggctatttttttaaataacaatgggaaattttagcctataattcacaatccttttattttttatttattttttattgttttgagacaatttcactcatgttgcccaggctggagtgcaatggcacgatcttggctcaccacaacctccgcctcccaggttcaagcgattctcctgcctcaacctccagagtagttgggattataggcatgtgccatcacacctggcaaattctgtatttttagtagagacagggtttctacatgttggtcaggctggtctcaacctcctgacctcaggtgatctgcccgcctcggccttccaaagtgctggcatgtgccattgtgcctggcctccatccttttattttaattaattttttttttttttttgtagagcctggggagtggctcatgcctgtaatcccaacagtttgggaagctgaggcgggaggatcgcttgagcccaggagtttgagaccaacctaggcaatatagtgagacctccgtttctacaaaaataaaaatagctgagtatggtggcatgtgcatgtagtcccaactattcaggaggttgaagtgggtggatcacctgagcccaggaggtcaaggcagcaatgagccaagagtgcatcactacagtccagccttgacaccagagtgaggtcttgctatgttgcccaggctgcgagctggtctcaaactcctggcctcaagtgattctcctctcttggcctctcacagtactgggattacaggtgtgagttaccacacctggccaccaccttctattttttaatttttattttttgagactgggtctccctctcacccaggctggagtgcagtggtgcaatcacagttcactgcagccttgatctcccaggctcaagtgatcctcccacctcagccacccagtagctggcattacaggtgtgagccactacaacaggcccattttttttttttttttgagatggagtcttactctgtcacctaggctggagtgcaatggcgtgatctcagctctctgcaacctctgcctccatggctcaagcaattctcctgcctcagcctcctgagtagctgagattacaggtgcccaccaccatgcctggctaatttttgtatttttagtagagacagggtttcgccatgttggccaggctggtctcaaactcctgacctcaggtgatcagtccacctcggcctcccaaagtgctgggattacaggcgtgagctaccacacctggcccattcttttaaataacagtctgcttttgttggtttccagaatttttagcctatcttttgagtgttttctgagtgtggtggtttacaaataactaccgggtgtttgtgaactttttttagtctttgaattcaaactctctttgagtactggaggctgcatctaatgctagctgctgaattgcttcaccccttggcaagtctctggagaagagattaagtaagtaatttgcttggggtcactcagctgataaacaatctcagcagcccctattttctgaacccacctcccatttcccattgcttcctactgtgaaatctgctctattgcattcattagaggactggattggttataggataaccatctgctcgagtcatctcaggatctttgtagattatcacaaccacttgaaccaggtccattctgctggtctcatactataatatgggacaggtaaaggttttgataatgtgtttgtgtgtgtgtgtgtgtgtgcattctgtacccttaccatattgcagagaaaatcatctgtccttccactttgtaattccaggagcaaaagggtaaagtagcagcatatctcagtgtggatggtctagtgactgtgtgtgaaagcagtgagaacaacatgcctttctgctatcagcacaggtgtcttttttcttgactcttatcaaagggtgggaatatgaggcattttgcattttgttgtgggatataggcaaatagtaaaaccttgaagataggctgaacacaggtgttcttggcaaggagagaatatggtgaaaatacaaaggtttttgtgacaccaagagaactagaaatcaccattcatttctgctgcttggcgtagatactgggtagatcacatcctcctggcaggagcagaaaacatttcagaaagtcagcataattttcagattgagatcaaacatcaaaccaagctaaaggtctgtgggaggaagggggtgcttagtctgaattcatcctggatttatcaccaaatcctatctgacttcagtgcagtgcaagcaattacagtgcatcaggtggaggccggaggcatacgttcattctttgaatttggcagagaagggttgaggagctaagggagaaattctaaactggctggactgcagggttgtggggagtaacaaactcattagcaatggggtggaattgggaagagatttaacagcctggggctgcaaggaggataaaccactctgaccacctctgagaagtttttcaagggattatataattaagaactggtggaagaactgtagtcatttaattcttagaggagtggttcaaaaactaaactgaacctgattagaggtattggcatacctaaatttttatttttttaattaattaattaattaattttttgagatggagtctcgctctgtcgcccaggctggagtgcagtggcgtgatctcggctcactgcaagctccgcctccttggttcacaccgttctcctgtctcaacctcccaagcagctgggactacaggtgcacaccgccactcccggctaattttttgtatttttagtagagacggggtttcaccgtgttagccaggatggtcttgatctcctgacctcacgatccgcccacctcggcctcccaaagttctgggattacaggcatgagccaccgtgcccggcccctaaatttttaaaaagcagatagatagaggaatagaactgataaacgtctttttaaagaaccttaatgggctgagtgcagtggttcacgcctataatcccagcactgtggaaggccaaggtgaatggattgcttgaggtcaggagttcgagaccagcctggccaacgtggtgaaaccccgtctctactaaaaatacaaaaattagccgggcatggtggtgggcacctgtaatcccagctacttgggaggctgaggtatgagaatcgcttgagcctgggaggcagaggctgcagtgagccaagatcacgccactgcattccagcctgggtgacagagggagactctgtatttaaaaaaaaaaaaaaaaagctgggcatggtggcttgcgcttgtagtcccagctaatcagaaggctgaggttggaggatcacttgagcccaggaggcagaagttgcagtgagtgagaccatgccactgcactccagtctgggcaacagagggagaccctgtctgaaaactaagtaaaataaaaaagttaagaaccttaatgggcctttctgtgttaaaacaacaacaacaacaacaaaaacaaccttaamaaagtactttctttaaattatttacagccaatttctgttgaacatccattatttgctgggctctgggttaaatgctttgacatgcgttattttaatcctttcaattatsttttcaatgtagcaggttttaattaaaggagttaaataacaccagaattcattctataccatggtacatttggctgcagtaattttcgtgcagtccactttggaaaggtaaattgcataattttgagcctagatagaattcctgtctggaaatgccttcttttcccggtgcattggagtgccagaaaccccttcacctagtccctgccttcatttaaaaaaaaatcctggttacccattagtcagtcattgtgataatatcttgtgaaagcagcttcttcagtagaaggtccagaagagcttatctggtaaatcctctttcctgcaccagagtagtagggggatcagagtctctttattcttgatgagctttgtcatcagtttcgatggaagaaggatcctgctgtaattaaactgcaggtccatttattctgttttcagcgttgttagaagactttactctgaattgctttgtttcctgattgactcaccctttggggcagaatgcctgggttgaaatgaaagcgtaggtttctctgctgcggtgttcaatctgtcatctctcctaaactccacactaagaagcagccatttaattggtcagaccccaggggtgatattttggcacagctccattggttagaattacttttccctgaacttcatagcagatgctgaggtccctctgcagatatttgtcatagaatagttgaaaccagggagtttctgagaacatttataacttgtgattattatgtatgtctttcagttgttaacagttaccgcttaagaaaaagagctcacttattgctagtgggaagtgaaatctctctcctttcccccttattcatattattattttaacagtttatgctccaagaccctctgctctctggttcctgtatcattttgttatgtttctccttccaccttgcttgggctgtgcaagtcgggaagaacaggcaaaggtacacccagacctgggtgtgtctggtagaggtcggtttctttgatttctagcatgtctttattttacatctgcatttgttgttttcatgtttatttgtatttgcagttcccattgcagcaccattccaatccaaaacaacagtgaaggcattgaagccttctgtgtctttttaggaagagatggaagtgaccgtcttgttcctcttccaggctctccttttctggttttgtccttctgtaataacaatttaaaccatttttcttttcttttgtttttcaagtaatcttagcagacaaagaaattctcttcagtctttcgttcaaggtattgctgtggttatgtgtgtttaaaatccttaatttactgatcatcccggaatcataattgtgcagtttctgtcctttttttttttttttttgagacagagtctcactctgtcagccagggtggagtgcagtgtgcaatcttggctcaccgcaacctccgcctcccaggttcaagcgatactcctgcctcagcctcccgagtagctgggactatgggcatatacaccaccacgcccagctaatttttttatttgtagtacagatggggttttgccatgttggccaggctggtctcaaactcctgacctcaggtgatccgccggcttcagcctcccaaagtgctgcgattacaggcgtgagccactgtgcctcgccaattgtgcaattttaagcatgaatttctgtcctttttttttaaaaagcgctctattgctgttatcattagttaataattcaacaaatatgtgttgattacctggcattaaggctgagaataaagctgtgaaatagacctactcttgtttcctgtttcactttccacaccctaaatatggaagaaaaatactttaaaaagaattatataggccgggcatggtggctcatgcctgtaatcctagaactttgggaggctgaggcgggcaaatcacttgaggtcaggagttcaagaccagcctggccaacatagtaaaaccccatctctactaaaaatacaaaaaattagccaggcatggtggcacgtgcctgtaatcccagctactcaggaggctgaagcatgagaattgcttgaacctgggaggtggaggttgcagtgatctgagatcatgctactgcactctagcctggacgacagagtgagactctgtctcaaaaaaagaaaaaaaaaagaattatacaaactgttagccagttgattagatacagtactgctagaatgctctttcccccagaatgtaatcattatgagattcaaggaccttgcctgttgttgttcctcttacgttctccagaggtacaggagattcatgctaaatagtctgataaatcaattatggttataaggaagtgtataagattctatgaggccaggcatggtggctcacacctgtaattccaatcctttgggaagttgaggtgggaggatcacttgagcctgggagatcgaggctgcagtgagctgtgatcgcaccactgtactccagcctgggtgacagagtgagaccctgtctcaaaaaaaaaaaaaatgttatgagagcacagacaggatcaggaaaggtttccctgaggaaataaatgatatgtaagggaggtgaggtggcaacagtgctccaggctgagagaatagctgaatagcttgagggagggagattcctaaagccaaaataaccttggtgtttgaagaactgaaagaataggatagagtaaggagtaaggccctgagcactaaggatttgctttcattattatttactagttacccagtgacaacacttactttattttttttgagatggagtctcgctctgtctcccaggctggactgcagtggtgcagtgtcgagtcactgcaacctccacctcccagataagcgattctcctgcctcagcctccgtgcagctgggattacaggcacctgtcaccatgcctggctaatttttgtatttttagtagagacaaggtttcactgggattacaggcgtgagcctgccgcgcctggctgacaacacttattaaaaggagggtagaccaggtgcgctggctcattgcctgtaatcccagcactttgggaggcccaggtaggattgcttgaggctaggagttcaaagaccagtctgggtaacatagaccctgtctctmcaaaaaaaataaaaataaaaaattagctgggcaaggtggtgggtatttgcagttctagctactcaggatgctgaggtgggacgatcgctcaaggctacagtttgctatgatggtgccaatgcactccaggctgggtgacagagacttgtctcaataaatgaatcaatgaaatagagcattagttgcagttgagacaattaagtcagaaaaatctcaactggagcaaaagtaagaagagaaactgaaatacaccttaaatatcagttaaaggctttatctttagaaggttgggggtctgtatcactggtaccctgaacttgtagaaactagaaatgcagatgacttatgggatgtataaattaaagttctgtagtcccaggaatggtttttctatgtattatactttttacaaggtgcttaaggtactttttattgaatcctacaaaaatcagaccatyttaattctgatttttgtaggattattgtgttaaataagacaacagatgcaaacataacaactaacttggcacattttaggtgttttgtaatgtttttactttgtaatcttctgagaaaggacttcaggaaccccaagttctgaataactcccccaattttccccgtgtctgccatctgaaataatagcacagaagattatgtcatgtctaaagttttgatcctttacattaaagtataacttggggactggaggagagaagaggctctagtccttgtgtctttgatgttactgacatctctgtgtgaaaggaggctctggaagctggtttggagagaggcaaacatttaatcctcatgagcccatgccttattataatgacggctatttactgaatgtctaacactgccctctgctcttgatgtaagattgaaaagtccagtgaagttatgatccccctttatactgagcaccacctctatgtccagcctgtgaggtgtagggaatgtattcctgttactctgaagctcctagtggcagcttactcaagctcattcatttattcagtgttagagccaggatttaaggtcaggtctgactgattttaaagccaaagtaaaacatacttgggaacagctttttttccccccacctttctctccaactgttctgtcttcttaaactttagacctaaaataaaattcttacctaggaaatatgcatttatctgttacccatatccaaaggactgccttggaggatagaaaatgtctattagtattaaaagctttggaaatgttttcctcccctgagttctggcctgtgaaatattccttgtttatgtccagcccatgcaccacttcagcagggctctttatcctaattcaggccttggattytaaagttctaccatatacatgtcttctctatgacttaggtattctgaattcttttttcttttctttttttttttttttttttttgagatggagtctcattctgtcgccaggctggagtgcagtgatgtgatctcagctcactgcaacctctgcctcctgggttcaagcaattatcctgccttagcctcctgagtagctgggactacaggtgcatgccactacgcccagctaattttttgtatttttagcagagatggggtttcaccatgttggctgggctggtctcgaactcctgggcgctcaggtgatccgcctgccttggcctcccaaagtgctgggattacaggtgtgagccactgcgcccggccaccgaattatttattctaaaataaatatctcagaaatagtatcacagagaacatgcttcattgtcccacccccagcatatgagaccagttagtagtatggtttactcagcaggcygcttacttacaaatgcaacagttgtcctattttatgctcattgtgttgtcaccagcattttaaatctttacaagtcagggtgggtacctcaggcaggtttgctggaaaattccagtaaacagtttcaaaggagttcaagttgcttgccagactaacttacttttaaaagtaagcagccttccaagttaagagatgattttaaatttcaggtgagttctcaggacattgtgattttttaattatgctgttggtataaatcagctgtgtcagggcctgtcccaccaagagcgttgggtggtaagaaacccaagctttgggtgaccagagagaggagagagaccttgggctttccagccagtaatgcctatgaaacatgtaggtcattggcattttattttatttatttttttgagatggagtctcgctctgtggcccaggctggagtgcagtggtgtgatcttggctcactgcaacctctgcctcccgggttcaagcgatacttctcccttagcctcctgagtagctgggactacaggcatgtgccaccacaccactaatttttgtgtttttagtagagacggggtttcaccatgttgtctaggctggtcttgaactcctgacctcaactgatccgcctgccttggcctcccagagtgctgggattgtaggagtgagccaccatgcccagccatcattttagaattataatttttagctggatgcggtaaaaaaaatcctttctcagccttcaggtctcatctcaagtatcaccgacatgaggagtcctcccccatttacacacaccagctcggtgtgaagaaccgaaaggtcacactacctttcggttcttcacacaccagcccactatggcttgaagttaacgagtgagaaaagtagcacggcatgaattggagaagtggtcagggtctttaaccatgtaagaagtgattatttttattctaaaatgcaataggagtccattaaagaacttttttttgaagagtttttaaacatttttatgtacaaagmgttaacatgatttctttcattgggtggatgccttggataatccatccaaggaagatcacttctaggaacaagcaacattaaagagctttaagtgtgtgtgttgaggggaggagggcagtgggtgatgccttgtggagaaataggtggatagaggcaagaattaaagctaggaaacccgttaggaggctgttcttttacccaagaagccattctagactctggaaattcggtagagcacaaagtccctgccctcatggggtttctattctagttagggaaagcagttaataaataagcaaataatatcagctaataccaaatgttatggtgaaattagaaaatgacattaaaaggctggkcgtggtagctcacacctgtaatcccagagctttgggagcctgacgcaggaggatccttagagcccaggagttcgagattacagtgagctatgatcaagccactgcactccagcttggagagagaccctatctctctctccctcacacacacacacacacacacacacmccmaaaaaaaaaaaaaaaaaaaaaagacattaaagctgatgtttggatgacaagaaggagctaagcataggaagttctagggagaccaatccaggcagaaggaacaaacaacaaatctaaagggcctaaggagggaaatgtgattaatatatgaaagatgatgttttaacccaccagcaggagcaggggagatgaaggtaggaatttatgcatctttgatttaagaaaagtattttttattttttttttactttttttttttttgagagagagtctcgctctgtcgcccaggttggagtgcagtggcatgatctcagctcactgcaacctctgccttccaggttcaagtgattctcctacctcagcctcccaagtggctgggactataggtgcctgccaccatgcctggctaattttttatatttttagtagagacggggtttcaccatgttggccaggctggtcttgaactcccgacctcaagtgatctgcccgccttggcctcccaaagtgctgggattacaggtgtgagccaccacacccggccaagaaaggtatttaaagcaacctgaggtgtggttggagagggaggcctaagacagcctggacactcacaacatttaagaacagagggaggggtaagaagcagcaaaaaggctttgaggtaggaggaaagccacgggggcagagtgctagaagctaagagatgtttagagggggagagtcgcttgtgtccagcattgctgagagattaagatgaggatagagaagtgtcaattagatctggccacttggaattccttggtgaccttgaagagattaggaatggtggttggctcaagctagattggagaaggtttaagagtgaattagaggttaagaaagtggagtcggccagatgcggtggctcatgcctgtaatcccagcactttgggaggccgaggtgggcagatcacctgtggttgggtgtttgagaccagtctgaccgacatggagaagccgtctctactaaaaatacaaaattagctgggcatggagttgtatgcctgtaatcccagatactcgggaggctgaggcaggagaattgcttgaacccgggaggcagaggttgcagtgaactgagatcgtgccattgcactccagcctgggcaacaagagtgaaattccgtttcaaaaaaaaaaagtggagtcaaatatttggagaaatttgatttagaggagatcacagaaaaagagctttactggggagggggagaatgtggggtcaaaatggggttttattttttatttttttgttattttttacaaattacaaatatttgactaggtgctttaaaaaatctgtcattggctgggcgttgtggctcatgcctataagcccagcactttgggaggccgaggtgggcggatcatgacgttaggagatcaagaccatcctgcccaacatggtgaaacgccgtctctactaaaaatacaaaaattagctgggtgtgatggcacgtgcctgtaatcccagctactcgggaggctgaggcgtgagaatcgcttgaacccagcaggcggaggttgcagtgagccgaggttgcgccactgcactccagcctggcgacagagcgagactgcgtctcaaaaaaaagaaaagaaaaaaatctgtcatatgggctgggtgcaggggcccatgtctgtaatcccagcactttgggaggctgaggcgggtggattgcttgagcccaggagttcgagatcagcctgggcaacttgatgaaaccccatctagacaaaaaaatacaaaaaattaggtgtggtggtgcgcgcctgtagtcccagctactcggcatgctgtggcaggaggatcacgtaagcctgggaggtccaggttacagtgagccatggtcgcaacactgcactccagcctgagcaacagagtgagacaccctatctcaaaacaaaacacaacactcatataaacttttaattcaaatgtaactagagaagtatataaattataagtgtacagttcgatgaatttttacaaagtcaacatatctacrtaatcagcattcagagtaagaaacaatgttaccagaagccccttgggctgccttccatctgtaatcctacctcacaggatgaccactatcctgattttgaacaccatagtttgcctgtttttgaattttatgtaaaacgaatcatttcccatgtattcatttatgcctcctgcttttgctcaacataagattcatctgtactattgcatgtatcagttgtttgttttttctcattgttctgtgaacatatcataattctaccgttgatggacacttcagttgtttccagcttgaggctattacagtagggcttccatggatattcctgtatactgtttgggtgaatgtatttctgttgggtatatgcctggaagcagaattgcaaagccatggaaagagatgtgggtgcgcgtgtatatgcacgcgcgcgcacacacacacaaaatttccaaattggagtaatttacacttccaccagcaatattagagttccagttgctcttttttcctttttttttttttttttttgagacagttttgctctgtcatccaggcaggaatgcaatggtgcgatctgggttcactgcaacctctgcctcccaggttcaagcgattcttctgcctcagcctcctgagtagctgggattataggcatgtgccaccacgcctggctaattttttgtatttttagtagagacggggtttcaccatgttgtccaggctggtctcgaacttctgacctcaggtgatccgtccgacttagcctcccaaagtgctgggattacaggtgtgagccaccatgcccgtctgctccagttgctctttatccttatcaacatttgctagtatctctttttcattttagctattccagtggtggtaacactttgtggtcataatttgtacttccattatgacaaagaagagtttttaacacctgggagattctggagcatacctgtatgatgataggaaagttcctgtagagatggaaagcaaaagctcagaggggatgggccacagggtagacagattgattttttaaattaaatcaggactacatctcaagagggtacgcttcagggtctaagtgaccaaggttcaaagcttggctttgctatcctctagctgtgacctttaacaagttacttaacttctcyraacctttttttctcacctgaaaatgggaagaactaatctaccttgccagaattgtgaggatcacatgagataacactaggtaaaagtacctatctcagtgcctggcaaataagcattcttccagcagagagtggctactttcttctttacttctcaaaatatgtaattacttatgaattattttagagaggcttagcctaagccctgttgatagacttttcacagaatttcctttcaaaaccattgcaattgtctttaattgctttttaatgataatacacaagatgaagctaagcccattctgtactaatgattcataatgtgggatacttttctttatgcactaacaacatagatgcttttaaccattccagaaatacgttagtgacagtaggcgtaccaccctcaataaactggacatgattctgtaaggcttgctttccagcccttttctgatttgtcatgtcagaaaggcatttctttaaggtttgggggcattttatttaggtattttaaaaggatttttgtaaacttttatacaatggtgcaccataagtgtgttaattccaagatgtagctgtctatgcttttgtgtaaagcctgttgttgcagaactaccttggtgcacagagcagttaattaaaatcagaatagattggatgagaaccttgggaatttttttactgccttagttttttggtgtctttggagttacattgcaaaccagcatggcccttctactcctctctccccttcatgggaagacccatgacaaccactgatctgctttaaatcatttgccttgggcaggtgaacaagcggagaagtgttttgaaactacttaggaatctaggacttaataggtagaaatcacattatctaccctcttgcctctaactatgactgtaccaagcccacctggaataggtaatttatcttattctgttattaacactgttattttcctgttcagcagggctaactctcccaagaaatactagcatacttatcaagctgacaaaatcctacatgctagctagccattcttgcctcatatcacaaggttcttccacagggaatagtaaatgtttttattcactactggccctacatctcccatttttctcccttttagggaaagtggaagaggagaccctagcaggcttcaagcaagctctgtaggacagcagttagacactgtttttgaggactaaattgccaagtctgtcttttaagaagagggtgaggggagtttgggaaggaatgttcaagccctgagtgaagatccaataattttctttcaagatcagaaggaggtttgtagataagagagaaaagtttttcatttatcaccttagggagaattctttctrcacctcacaattagttccactttcagtcctttaatagcattatcaaatgccatgtatgtatatctatttagggatgaggaatgaaaaaaatattcccaagagaaaagtattttagcttatatagcgttgttagttacaaactctttccttccgccctctgaaataaccctgaacgtagttgttatttagggttagggctttccagtttggcaggagagtacttctaactgaccacattaggacatgtttcttttttggtatttaaatatctgtcagagtggccgggcatggtgctcatgcctgtaattccagcactttgggaggctgaggcaggtgtatcacctgaggtcaggagttcaagaccagtctggccaacatggtgaaaccccgtctctactaaaaatacaaaattagccaggtgtagtgatgcacacctgtagtcccagctacgcaggaggctgaggcaggagaatcgcttgaaccctggagatggaggttgcagtgagctgagatcttgccgttgcactctagcctgggtgacaagagtgaatctccatctcaaaaaagaaaaaatttatatatatatacatatatatatggagtaaaatatatatatagatataaatatctatagatatagatacagatataggtatataaagagtaaaagcctagtcggctgactttggcaaacctgttctgttagactgagcaggtctaaggtatgttaacactggagaatcttgccactacctgatctttcctgtaataacccccttccccacatatgtatattcctagcataagacttcattctccacctaaacttggagactgtggggtggcagaatggcaattttttttttttttttgagatggagtctcgctctgttgcccaggctggagtgcagtggtgcaatttcagctcactgcaacctccacctcttgggttcaagtgattctcctgcctcagcctcctgagtagctgggactacaggcatgtgccaccatgcccggctaatttttgtatttttagtagagacggggtttcaccatgttagccaggattggtctcactctcctgaccttgtgatccacccacctcagcctcacaaagtgctgggattacaggcctgagccaccgcgcccagccagccttctttttaaaagtagccagatgacttgaataggctgatagctcttctttcagagatgttcagaagaggcacttaaggttagaaccaaagttaagagaataaaaatagtgtggaggaagatgggttctcttgactccagctaaagaagagttttcttctgtcttgtatcaagatgttcaagttgagctatatgcctttcaaggctccaaatcccctcgggacaaagacctagtcgaaatcacttttggtgtttccagtacccacaatatagctggtgcttcgtaagtacattgatttttgctgggcgtggcagctcccacttgtaatcttagcactttgggaggccaaggcaggtggatcacctgaggtcaggagtttgagatgaggctggccaacatggagaaaccccgtctctactaaaaatacaaaaataagctgggtgtggtaactccctgttgtcccagctactcgggaggctgaggcaggagaatcgctttaacatgggaggtggcggttgcagtgagccaagatcgcgccattgtactccagcctgggtgacagagtgagactctgtctcaaggaaaaaaaaaaaaaagtaacgtggatttaaacaatatacaactttccagtttttcctactgattgtgccttaccaggtgggtctgcctattttgtgcaaagtccttttaggaaaaatttacaacctgtagattccttgtgtggaacaaaagtttatttttttcatgtggctaaatctatctcccctttccttttttatttttttaatttttgagacaggaacttgctctgtggtgcctagactagagtgtgctgtggcatgatcatagctcaytacatcctcctggactcaagtgatcctctgtcctcagcctctcacatagctgggactacaggtgcgtgccaccatgcccagctaattattatcattattattattattattttattttttatttttttgagacagagtctcgctctgtcacccagactggagtacagtggtgcgatctcggctcactgcaagctccgcctcccgggttcacgccattctcctgcctcagcctcccgggtagctgggactacaggcgcccgccaccacgtctggctaatttttttgtattttcagtagagacggggtttcactgtgttagccaggatggtctcgatctcctgacctcgtgatccgcccacctcggcctcccagagtgctgggattacaggcttgagccactgtgcctggcctattattattattttttatagagatggagtctcagtgtgttgctcaggttgatcatgaattcctggcctcaagcgattctcctgccttggcctcccaacatgctgggattatagatgtaagccactgtgcccagcccctttcctgtttattttgtactttcacttttctattgctaatactataaatttatatttggttatacctgccttcacctctgccccactgtctggtgaatgaggtgacttttatcctgcccgggaatagacctaccccctaatctgatcacatgatcacttctttttcttatgtatttatttatttatttatttttgagacagagtttcgctcaaaatgcccaggctggagtgcaatggtgtgatcttggctcactgcaacttccacctcccaggttcaagtgattctcttgtctcagcttccccagtagcttggattacaggcgcgtgctaccatacccgggtaattttgtatttttagtagagatggrgtttcaccatgctggccaggctggtctcgaactcctgacctcaggtgatctgcccacctcggcctcccaaagtgctgggattacagccatgagccaccatgcccagccatatcacttctttttctactccagcctttactcctattccaatcatttattgtcagcttcacttcctctacagtctcttaatcttttggggactcctcagcagtttgtgaatatgtctgcatttatcctggtgacactggatcttctttagcaactgcctcctctcttcctttcattttacagtcaagtttcttgaaataataatttatccttggaattgtgtgaattcrtacttctcattcactttccaagctatgattatcagcttctttcttcctaaactgcttaggcaaagagcacacatggacactttcctaaaccttagtccattgggcattttgcattcttcattgtattstgttctctgagacatttgacagcgttgataatttcttcttgaaactaaaaacactcttccagttccccctgctctgagcattcttttttcctcttttctgctgtgggctttcccctgcttgccctatagatgtggttttcccatgccttcttctcttctgacccagaccatctaatcagcctccggccccactctggctttacgtacttccagtgggccatgtgttcccaaacctttatcttcagcccaaacatgtacctgtgtatacatcagcatgtcccatgagtacaaaactcaactcatcatcttaacccgtccctattctccacacacagatacatgcctcctcctgagggcttcatttcagtaagtaattccaccatctattctgttgtgtaattcagagaccctagactttgtcctagactctcttttctctcccccttctctcgtctgctagttcattctgctcattctatcagatctgcacctttttaaaatttccatatttacccatcttgcctctctactgcagcaacttcctgcttccagctggccccttgctgatctgtcccacacactgcttataagtgtgcactctaatatgcaaatgagacaacaaaatgccctaatcgtgtcccattacgtataggatccagtccaggttccttaccagggaataaaaggtttttcttggctctttgtttactacttgtaccctcatctactccctgccttgctccctgacccaaccaagcattttgtagtttctttttctttttttttttttttttgagacggagtctcgctctgtcgcccaggctggagtgcagtggcgcgatctcggctctctgcaagctccgcctcctgggttcacgccattctccttcctcagcctcccgatcagctgggactacaggcgtccaccatcacgcctggctaattttttgtatttttagtagagacggggtttcaccctgttagccaggatggtcttggtctcctgacctcgtgatcctcctgcctcggcctgccaaagtgctgggattacaggcgtgagccaccgcgcccagctgcattttgtagtttctttaatgccatggtgcatattacttgttttctgttgaaaattccttctcttcttgactttctggtaaagtcccagttactcccacatcatgataggatgtgcggcacctcatttgaaaagtcttctctggtcacccctcttcccctgtagagctgatcatttccctctgtgtagcctcccaataatacatggtgcaaacctccgttaaagcactgatcaccctgaaatttcaatatttggtttacatttctagtaccctgactagaccatgagctccttgagggtaggtacttaaccttccttacctagcactggaaacagcaaggcactggtttcagtaaaagttgcatgcatcatgaatgagtagagagtttaacagaagttagtgaattggccaggtgtggtggctcacgcctgtaatcccagcactttgggaggccgtggcaggcggatcacctgaggtcaggagtttgagaccagcctggccaacatggtgaaaccccatctctactaaaaatacaaaaattagccaggcatggtagcaggcgcctgtaatcccagctactcgggaggctgaggcaggaaaatcacttgaacctgggaggcagaggttgcagtgagctgagatcatgccactgcactccagcctgggcgacagaaggagactccatcccaaaaaaaagttagtgaattgcctacaaccttgtcctctttgcaggggacaagcccagaaagccagatggtaattgttgtgaaatctgtaggtttattaggtttattttgtacctttgccttcccagaaaaattgtagttaaaagcattgttataatgtggataacaacaactaatgtttatatagtgctttatagcatacagactgtccagaggagaaaaatgaagtacagaaagtctattacttgttagagggaggtaacacagcccttaagtaagtagagcaggacttaggactgaggccttcttattccagattctatattctttttattattacatactgtctcagatttgtctgtcaacgtgtgatttaaagaattacaaaatttggctgggcatggtggctcacaactgtaatgccagcactttgggaggccaaggcaggtggatcacttgaggtcaggagtttgagaccagcctgggcaatatgacaaaacccagtctctactaaaaatacaaaaattggctgggcatggtggttcacgcctgtaatcccagcactttgggaggctgaggtgggcagatcatgaggtcaggagatttgcccatcctggctaacatggtgaaaccccatctctactaaaaatacaaaaaacacacacaaaaaaatgctcaccatcactggccatcagagaaatgcaaatcaaaaccacaatgagataccatctcacaccagttagaatggcaatcattaaaaagtcaggaaacaacaggtgctggagaggatgtggagaaataggaacacttttacactgttggtgggactgtaaactagttcaaccattgtggaagtcagtgtggcaattcctcagggatctagaactagaaataccatttgacccagccatcccattactgggtatatacccaaaggactataaatcatgctgctataaagacacatgcacacgtatgtttattgcggcactattcacaatagcaaagacttggaaccaacccagatgtccaacaatgatagactggattaagaaaatgtggcacatatacaccatggaatactatgcagccataaaaaatgatgagttcatgtcctttgtagggacatggatgaaattggaaatcatcattctcagtaaactattgcaaggacaaaaaaccaaacaccgcatgttctcgctcataggtgggaattgaacaatgagaacacatggacayaggaaggggaacatcatactctggggactgtcgtggcgttgggggaggggggagggatagcattaggagatatacctaatgctaaataacgagttaatgggtgcagcacaccagcatggcacatatatacatatgtaactaacctgcacgctgtgcacatgtaccctaaaacttaaagtataataataaaaaaaaataaaaaattagccaggtgtggtgggcgcctgtagtcccagctacttgggaggctgaggcaggagaatggtgtgaacccgggaggcggagcttgcagtgagctgagatcatgccactgcactccagcctgggcgacagggcaagactccgtctcaaaaaaaaaaaaaaaaagaaagcaaaaattagctgggcatgatgacagctgcctgtaatcccagctactcaggaagctgaggcaggagaatcacttaaacctgggaggcggcggtttcagtgagccgagatcatgctactccactccagcctgggtgacagagtgagayccctgtctcaaaaaaaaaaaaaaaaaaaactacaaaatatttcagagggctattcctcctctgttgtccccatttctcttggcagcaaagaactcatttactttatcatacacacactctgtgaagaactctttacttcattattccatgtgaactgttaattgcaagtaaaggcagattacttgcaattcttattctaggaacttaagttcctgggaactaagttcctctcctgggaacttagaaccctcagacaggttatattgagtcagagagaaatgtttctgatgtgctgaagattgaacaaatgtgtgattagttaagacttagatattgtatatgattaattcatttgctagttcttgttgagctacctgtctaattgggcactgttagactatcacaatccctgttgtcgtgggggttacaggcaagttacaggccagttggggagacaggtgttaatcagagacccctgcaagggagcgaattatatcacaggtgcagtggaggcagtgttggaaagctaaaaaggacctagagaagtgaagaggcctgaggttatgagctatttgacctaggaagttacttccccttgctggttctcattcttttttcctcgatgaaataacccaggttgaatcagttggcttcttagttccttctagcttatgaaagtgcccttgttaaaacaatgagtcaggagacagcagagcattctattgtgtgaactgattatcaaataataacactaaatgtttcatttattgtctctgtaagcaaagagttcaggctcaaagtatctacatgggctgctttagtctactgagaaaaacatactcatatctcacatcaatgcttggcatttgagtgggccctcttacaattgttaggttattctgacatttgagggattggatccagatcctctttgttttgtgatcgtaaaaatcatcagccctttgtccccagtacctgcatttgatatgtactatgggagtaataaaccaacactttttttttttttgagacaaggtctcactttgtcacccaggctggagtgtagttgtgcagtggcacgatctcggctcactgccatctccgcctctcaggcttaagtgatcctctcacctcagcctcctgagttgctggattacaggtgtgtgccaccacacctggctgatttttgtatttttttgtagagatgggattttgccatgttggccagactggtcttgaactcctgagctcaagcaatcttcccaccttggcttcccaaagtgctgggattataggcgtgagccaccacacctggccaacgcttctttttttttttgagatggagttttgctcttgtcacccaggctggagtgcaatggcacgatctcccgtcactgcaatctctgcctcatgagttcaagcaattctccagcctcagcctcccaagtagctggggttacaggcgcctgccaccccgcccagctaatttttatatttttagtagagacagggtttcaccatgttggctaggctgctgtcgaactcctgacctcaggtgatccacccgccttggcctcccaaagtgctgggattacaggagtgaaccactgcacctggcccaacacttttttttttttttttttttgagacggagtttcactcttgttgtccaggctagagtgcagtggcacgatctggggtcaccacaacctctacttcccgggttcaagccattcttctgcctcagccttccgagtagctgggatttcaggcatgcgccaccacaccctgctaattttgtatttttagtagagatggagtttctccatgttggtcaggctggtctcgaactcccgacctccggtgatccactcgcctcagtctcccaaagtgctgggattacaggcgtgagccactgcgcctggctccgaacacttcttaataaacctacagaggctctgattcagtaaggaagcaaatatttgttgagcttctacatggacaacagtgctagggaacagtactgtacataatgaataaatatcccctgccctggaggaatttatggcttagtagtagaaaataaagagcaagatataactgtgcaagaaagtataataggtgctgtgatagaagtttatctaggattgggggtacaaatgtaagagtagttttactggctggcaggaggggaaatcaatgaatggacaacatagtatagggaaaaggatgttaggtttggagtcagaagacctgggtttgtagaatctcaactctgtatattagctctctatatattggctatatatttgatttctttgagtctgggttgcatcatttatataaagcaatgaacaatagtcttccccagctcagcgccatggctcacgccttaatcccagcactttgggaggccgaagtgggccgatcacaaggtcaggagttcgagactagcctggccaatgtggtgaaatcccatctctactaaaaatacaaaaaagccgggcgtgatggcrggcacctgtaatcccagctacttgggaggctgaggctggagaatcgcttgaacccaggaggcggaggttgtgatgagctgagatcacgccactgcattccagcctgggcaacaagagcaaaactccatctcaaaaagaagaaaaacaaaatctgtttgaaaacacaycctcccctccaccttggtggcatgcgtgcattgagtgtcactgctcacctgtgctctcggacatcaaaaggacagtagaggtrtgtcttaactctgaccttttcccytttcctcccttgcaccagattttatcatgtgggcaacctgctgcaactggttctgcctggatggacagcctgaggaggtcccaccaccccagggagccaggatgcaggcctattccaaccctgggtacagctccttccyttccccaacaggcttggaaccaagctgcaagtcctgtggggctcactttgcaaacacggccaggaaggtgagtgctgacttcttggcctgctctgccactgcagcctatggaccatgggcaagcgccrctgacccctctgaatgcctgcaaccttkcctttccctgtgtgatgctggtgacccagagctgtccctttcacaaaaatgttcaagaagaactaactgagtaaaagcaaaagcaaagcatgtcagcatagatttggagtcagtagacctaaattcagttatcagcgttgctacctactagctatatgatctaacctctcttgagattcagtttccctgttataaaatggggatgattgtagtcctcatctttcagggttgtgggaataaagtgagacaagaaagccatgaaaggtgcctagcacaatgcttagaatgtcgtaggcacttgatgttatttccatcattagccaccatcacaaaggcctgattgcagattaacttgttctttttatcaaaarcaacgttaaggatgcctcaggtacatgaagaccataacaaagactggagcttatttactgtagcagatttcatttgaaatgcttgggagccatgcttcccaaatgaatgagctggaaaaaaaattactggctagataatggtgtctaggtgtgcaccctccctcttccagaggcagtgagttatctgtgatcaagcatgactaggcagaaggtaaaccctcacctggataaagaactcctgcattctgcatttttctgcagaatgagaggtttgcagctcagaataagtgataggatatgatgttaaaatggtgatcatgggaaatttgagaggaaatcatacttttaaaccatctgctatgtgcaaaggactgtttaaggaatttaaatttttttatttcatttaatcctcacaatagctatgatataggttttagaatctcccaaatcccattttacatatgagaaactagggcttagggtttaaaatttaagaagaacattgaatgtgttaaattcctgacaaatagcatgagagatattaaaatactcattcttttcccttgacttcagtagtgctcaagatcacatagttattaaatgacagagccgggattcaaacccaggtccttgattccaaagcccctcccagaagacattcagcatgtcgagtagaagatgacagttacaggcctgggtgcctagaaaagcatggcaatgattaaaataaggtgctttttttcttacttattggaaaatgaattactgaatatctactgtgtatcaggaattgcctgggctagggaggcagagatgaagaaggccattgctgcttaacggggagcttgcagttggacagggaggtgaggacagtgcacaccatacgatgtgacaaaagaaaagtgtgtgtaacaagagcttctggaggggaagaaaaattccagtttggatggtaaaagatggttattggtacaatattttcttgctacaatattttcttgctacaaaagtatgarttaattttgtgcaatttacagtgaattttgtgaatattaagggtgttttcatctatgagaatttttcatttgtaatttcatgcttaagtggatcagcattcttatcttaagggtttggcatttaacacccaggggctttcaaaatgtctttttctagaagtgcttgaattgaaatgattccatggatcctactatctttttcttttccttattcttcattatggtcagtactttctgaatgcttattgggtgcaaagcacagataacattcaggactttatagacagaatataagtaagatgtggcccttgcattccctgagttttcagtcctaaagagaaatggcaggctgtacttttgccacaagccaaataccccatctctrttggtaatacctccctgtggtttagcagcgaccctgacggttttggagggagtctggcacccagcctctttagttggaccagttggaggatgaggttatgcttggagccatggaagtgatattcagatctcagagtgttaagagaggactgggtcttaggtgctggtaaggggaaagaaaaaggtaaccgtgttaccttttctggagcatccactttgtgctaaggttttatatacattctctcatgtaatacttcccatattccagggaatagggtgggagggagtaggagcaagggaagggcagttggcaaacgggagccagcagaaccctgcacacggcatccttgaagggtggtgtcggcctgaggcgccacggccagttctgtgatgctggatatctcagtacaccctgggcatttctgcaggcatgttggttgcctccactaattcatctttcatgctacctggttactgagttgttttgaaccattcggcagaatttatacataagtgtgtcctttgctcattctgcctgcatttgttgacagcccttttttcctttcttcttgttttcttctgccactgcaaactggggttttagcctcaagccctatcctgttcctgtagggtgtgtttcagatgccagcttatttcagagttccctgtgagccagcgggtgcatagaagctaggttgttgtctgcattctgatcttgcatccagcaagccacacacatttgaagaaagaatagagagttgtttggatctggctgattgagcaacgcaggctttataattgtgtcaagctaggtcttgtcagactgcatcgacttaagtaatattccatgtcaggcccacaggtttatggcattgaagcctctttgtttcagtctcagtcatcctaaacagacttcatttcccaatagaaaagctttagatgtgaatgaaccccaaatacctgaaaacatccattttctgcctgcatggctactggtcccagaaccgttacaatgctagtgcagccatgcatccttttaagtccatctctgaacagtattgtttggttataactgtatggagaattagggagcttgatatatgtccctttgcaatgccttctaagtcttaatagccaaaactgggtggtaaatattatttccttttccctttactatgtgaatgatacttagacaaaacttatataactatcttaactatgcagacatttacttcagcccagagtgtctgtgatcttgactatgagaatcttgtctcttgagctttcttttttagcttgaatatctttctatatttcgaaaagatggaccagaaatatttaagttactacttaagtcaacacaggatgaaaagtttttaacttctttaaaggattaatgagggtgccctccaggccaatcccagtgtgctcaggaattacctctcttgttggggatgtgacatgctcttggccagaacagagctcagccggatgtcactgtgctcactcagcctgtggggtgagaggccgaggattgcttcctgtgggctgagtaagccttcctgtgttgtcagcgactgccagactagctgctgccaggcagtaccagcttgcccatcaggcgctcttgttgcctaactgagacactctgtgctttcaggaacgagagtaccctgatgtccagacagcctcccgttgctgtctaaatatttgtcttggatatgcttgtaagcaccactgggttcccagcactctgagtgggccttcctggagtggggagcctgtgtcgatggagcagtgggtggggaatttggagatggaagccaggcccttgactcagaactgctctgtacttgaatggaactgagctatgcagtatggcctggtggaaagaatgtgatcatgggcattagcctccaacagaccttgagtgtgaatacccgctctcctgtttattgcctgaccttgaatacaacagttgatctccctaagcctcggttgctttgtctgtgaatcagggaagaacactaatacctactttgcaatgtcgctttgagaattaaatgacaagctagcatatagaagcacctcaataaattaatattaattgtaacaaccaccaccaccataaccttcatgcagaaataattacagtttaggatttgaatcctggctgtcaccgttaggtaatatttcctagctataataaaacagcttacacttgttgaggactcattttgtgttagatatgctaaatgggttmtctcttaatcttcacaacaaccccatgaggtagatactgttatcacccccattttacagatgtggaaactgagcaccagagaggctaaattacacacccaaggtgatactgcaagaaataagggagggaggcttaataaaaatgcagagctttttgattcttatgctggtagtcttaattaatacctcaggtgcttcaggagtaaataaagtaagcctcaaattaaataataaatgtgaagtgtcctgtacatggatatacacaatacatagtggaggtcttccacccgagtggcttttaatctaaaatctgaaagtggcttgcacccttagatatatgagagagcttagtaaaagtaagagtgactggaggagatcctgctgggcttggcagctctgaagctcccatcgcactctctgtcttgttctctcaatctgacatggtttcctgtgtcttttgctctaagcagcagacctgcttggactgtaagaaaaatttttgcatgacctgttcgagccaagtagggaatgggccccgcctctgccttctctgccaacggtttcgagctacagcctttcagcgagaggagctcatgaagatgaaggtgaaggacttgagggactatctcagcctccatgacatctctaccgaaatgtgccgggagaaagaagagctggtgctcttggtccttggccagcagcctgtaatctcccaggaggacaggactcrtgcctccaccttgtccccagactttcctgagcagcaggccttcctgacccagcctcactccagcatggttccacctacctcacccaacctcccctcttcatctgcacaagccacctctgttcccccagcccaggttcaggagaatcagcaggtaagggcccatttgtagtctctgccagtctgtgccagtttgagggctcattttcattttcctctcctgcctttgttgtgagaatggggtataaggctaagtgtcttgattatgtgaagcctttctgactactggtgcaccaagtgttttctgggtatcagactcatgttttggctttcttcagaggtgatatgcacagtaccaatttttttgtttgttttttgtttttaatacacacatatcctagttagacattttttaaagttcatcattccagaaatattttgagaaaagtaaccattaagccatcaaatttagttctgttccaatttgtctttcaacttaactcctttgttgcagtcttcattggctggattggaaacttagttccttagtaaccatcacaaggaatataggaaagcaaagggctatatggaggcaagggagggtggggaaacagacaaagacactgcttctcttaccagtcactggctggaagcaggagtagttggcacgctgtacttgcatgctgcttcttcattatcctggggggcttggaagtggtaagctaagagcagcacatcaactgaatcatgacccaggtctggggagtatagaaatgagtaataaactgtctctgtcctcaaaaagcccccagaagagggaaggtagacaggtagaccaactaactactggattagagtgaggccagtggacataattgttgtataagaagtgatgatgttgcataagtgccttaagtgactctgttatttatagcagcggcccctaacctttttggcaccaaggactcgttttgtggaagacaatttttccacagactggggtgcgttggttttgggatgaaactattctacccagatcatcaggcattagttagattttcataaggagcatgcatcctagatccctcgcatgcgcagttcacaacagagttcacattcctatgagaatctaatgccaccgctgatctgacaggaggcaaagctcaggcagtaatgcttacttgccagccactcacctcctgctgtgcatccgggttcccaacaagccatggaccagtaccagtctgtggcccaggggttggggacccttgatctatagggcttgggcaatatgggggaattaggaactacaagatccaatttccacatccacttttgtcactgacttcttgatccccttgggcaaatgttgagcctacaacaatgaaatgaggttagtaatcacagaccacttttgatcttgccaggatgttgagagacctgaatgcgtgataccatgtctaaaagagctctgagttacttagagctggtatagtgctagtgctgttggttcccacacatgatgtggatggctgctgccacttgtttatgatcacctcctttgccaggactgggccccctgattcagctcttgacaaccactgaggcataaaggccaatgtgatagcataatttaactgcagtaaaatcatttaactccctttttggcctgaacatgtttttctccgcagctggactttaattctttcctaagctctgactcttggtctgctagacagatttaaactcctgctatatattcttccctttgcttgtgttttttttttttccactctatgtataaggagccaggagaagaacttgaggaattctttttctgtaaagaaccttggctgggcgtggtggttcatgcctggtaatcccagcactttgggaggctgaggcaggcggatcatttgagcccaggcatttgagactagcctggcaacatggcaaaaacctgtctctacaaaaaatacaaaaattagctgggcgtggtggtgggtgcctgtagctactcaagaggctgaggtgggaggatcatttaagcctgggaggtcgaggctgcagtgaaccatgatcatgccaccacactccagcctgggcaacagagtgagatcctgtctcagaaaacaaaaacaaaaaaccaagcaaacttttcaggtagatttttcaatgaaagatgataagcttcctgtcattaaccagaaattyccagattgcacctaaaggtcaccctacatacaagatctaagtgggtacttttcctctgagattttcaagagaccttagtgtctgcttacatcccctgttctggtgagagctgcactttgcaagcaggaaaaacaggcatggaagaattaagtaacttacgcagtactgtctgacaagttcataagtgagctgcacctagaatgtaaatttccttataatacttgctcaaccagagttctctctttcacctttagtgccctagcaatcaatagttgctaggcaaggaagtatatacaataagcacaactgtggacaggtactagttttggatttttatttagccagtgggcaaactggaaagacaagagcatgctttgcagcatgaggtcgtttctctttctaggaaacaggacatctgaaagatagctacttaggaacaggttaggctctgaaggattccagggtaattccaaggtaacactacctgagagaccagtgaggatctacagtaagctaagagaaaacgttgttgatgaagacattgatttggatccatccccatacatgtgtactatgcatttgatcttgccttgatttggcattttgttacttctgcttttcatttccattgcagttggttgcctcttcttgattagctccatattatgaatcctaatgtggggtgagtggctggggtcggtgggtgtctttggtttcccagattgtcccttcactggcatccccagaatctggtggaaaaggcctgtgagctcagacacctctttgctctgagctcacagcaggccctttgcctgcagggagcagtgggcgaagaggatctacttaaggggtttgtggcttaaatggtgatggaattaggaggctaacagttctgcctactctttggccaaacctcctaaaagagtactcaggaggaaccttttgagaagtgagaattctaagcataatgaaattccgtaagcataggcagtgttttatatagtgttaggctaatagattcttagatacattaaaatactctttgactaggtctggacatagcacttaataatagtgtgctcaacatggggagcacatttccagaatgtgagagtagttactaggcagaaaagaaagagactagggtggtgatgatctggaaactttgtcccatcagtgtcagataaggaagccagggagatttagtgtgaaggaggggaaaacatggtataaacagtttgggaaaaacaaaaaacaaacaaacaaaaaccccaggagactatggtctgaggagcagaaccagggatagggatggcaattttggatcagtgtcaagaaaaaccttgatgccagatagagagcagtccagcagtggaatggacacaatgaccttcccttcacctgtggtgctcaagctgagattaaattgatgatgagttgtggctactgccatcctggtgtgtgcagaattaatgcagttttgttctagagggcagctttgtctattgaaatgtatttttgttgtttctctgcttgacaaagttggtatgagagagcaggcttttgtaatgatgctgtaagaggctccggatttctgggcatgatgggagtacattctggacattgtgtgagttgaaaagaggcccatgctatgyagatctctgggacatctctagatgtgatgttacttttctcttcccacaggccaatggccatgtgtctcaggatcaagaggaacccgtctacctggagagcgtggccagagtacctgctgaggatgagacccaggtggggcctctgcttgggtctgtgtcttcacctttcctctttcactggtgttcttcggaacctcttagcagagtcgagtggagagagaataaatgtgtgatgatagtgcttccgaaattatatttttggggtagggtttagtgttagtgttccaggttaactagtgaagcggtcagtgtatttataaggagttgtgaggtcacagtggagacggagaagcctcatggcccattgtatttccagtctcttgactttctaagagctgccggagggcaggcttgtggtcctgctgttaaagtcttgttctttccttgcttctagcacactgtagccattgtcaagggaaggaggtcagacaattagccaggcagggccagtccagagcacagaccagggagctgtggccaaggttgtgtatagaggagtacttgccagggaaatgtgcctcttgtgggcaagcagaagtctccaggggagaagggccagcaccatgctgggtttcatgtgcggccatatttaacctctacaggacccctgtggggtaggactgctctctccccttaatggaggggcaaacgggctcagagtggtaagcaacttgctggatattatttagcattaacagcagaggagtcaagattcaaaattagggtcatatgactcaaaccagcactccttctactatacttctatctagtactatatcacactgattggttggtctgtgtctgtttgctcctgagcacagaatcgtgggtcaggaagagattctagtatattttgcaatgcagagcaccatgccaggtactcatcctgtctctgttcctacccttcatgaggtcagtcaccaaaattatgatgtggtgactgctttggggtccttgragaaagagcttggggaggtaagagctgagcacactgatctcatctttgtcattgcagtctattgactcagaggacagctttgtyccaggccgaagggcctctctgtctgacctgactgacctggaggacattgaaggcctgacagtgcggcagctgaaagagatcttggctcgcaactttgtcaactacaagggctgctgtgagaagtgggagctgatggagagagtgacccggctatacaaggatcagaaaggactccagcacctgggtgaggggctatctgcatggtagctttacagagctcaggagtgtttgctgtcactccaaagcatgatggyattgacctgactcaatttccacacttaagccatggaaggagacaccttacatatttgcaccgtctaataatagctgtcatttgtggttgagtgtcaaaactagattaggcattgcatgtatgtatttattccttagagcaacctatgaaatagacattattagcatcacccctttatctgaaaggtaaaatttaactgaaaattttatggtctaagtccatagcctttctcaccatatgctatcccctccctactcaccaccaccttgtaagttttcttaccttagaataagaatgcttgttctgaagatttgggaggtagaaagtgaatctacatacatggcaggagaagatagctgttccatctgcacttgggctcttccttttgttcatttcccagagcattttacactgtatcattcaggagatgcccaggaaaatatctgggtctgtggttaaatgagtttagggaaaaatacctcatatcttcattactgatttatggtagatttttatattaaaggcagagaagtcctgcagaagagaaatgtgttttggctgttttgaacttagcatttcctgaaattatttcaccacagaatcttctcctttcctcccatccccagttgatttggttcctacagagcaacatactgattccttgcttggtaagagtggttgaagtcaggtttcaggctctcttctaccagtagctcaaattcatcagtgttaggggtcatctgactgactcttcaccygattacagactgaggcctactgacatggagtctgttttccctttgggattgtttcaagagtcttctctcsagtcgtcaggacctggggaacagaacagatgactccacgtgggaactttatccagattctctgactgactgaaacagctagatagttcattctttcttgactttaatgctgacttcaaaatagaaaaggatattgcacatatacagtatccttctacttggcagtttgtgcaaactggtggaataccttttcctaagagtagaccaggctgggtgtgttggcttatgcctgtaatcccagcactctgggaggctgaggcaggtggatcacttgagatcaggagttcaagaccagcataggcaacatggtgaaacaccatctccaccaaaaacaaaaaattagccrggagtggtggcatgtgcctgtagtccccaggtactcaggaggccgaggcaggagaatcgcttgaacccatgagaaagaggttgcagtgagccaagatcatgccactgcactccagcctgggcaasagagtgaggctccatctcaaaaaaataaaaaataaaagtagaccagatgcacgagtaggagctttgtgtgagttctgagcatgtagagcgagtagagggcagatgtccatctaggctcttggcaagcctggttcccagcagggagtggtaagagttcagaaatgatgtcagggcagtaagagactgtrtttgtaccatcatgccttacctattcagacatccttctctttccttttcagtcagtggtgccgaagaccaaarcggtatgtagttgtttctgtttgggaatgggcttaggcccttttgtccttcccctccttcaaccccaatccctttagtaatctaagaattctgagcatttgagsccccagagagagggtgtgtgggaaactcactgagacccagggggcctctcaccatctttagaaattctctctgctcgctgtgcaggaagcagagtggagcatacgtaggggcggactgactgatgtgcatgtccctgggctacctgagctcataagccaacatttgtaaaacactgaaacagaggaggggtggcatgtatcacactcagctcattttttaaaatcttggtgttttcagttctggtctgggtagggagggtctctgtgtacaccttctggggaatcagggtgtttagcagcttctggtactaaccaaaaagaaagggtggtgacctgagacagccctgtttgtacagggctggtaatggttagagctactctggagctaacacatgtgctactctctgggcacaagctatatatctcagctcagctgccactcacttaaagaccaccactgggccctcaggtactcccagaacacactgcagaactcctgaccatctgtggggacattctaaaatatgctatgtgttttcaaaagcctcaagggtatatggttgtgaactcccttccaagagagaacgttctaagagtagtgttggactagcctgcagcattttaaaacttatttcagaagatttcccaaatttatttagtaaaatggccttttgctcagaatgggcaattttatgtctgattacttctaatcagacataaaaaacagttgagcttttctcaattccccaaaaccatttggagttctagacccacctccaccctccaaccccccagcatcaccggtaccaagatcaggctgatctacttggtgcttcctttctttttctgattccctgggagaatgctgacaactgagttaatgtgtttgttgttacttctgagagaatgagtaactgaaaattataaattattcccattcatcttaggtatttgtatagtctccaaacctctgttaggaccaacagcacctcaaaagaggcaaatgggtttcactccctttcacacccagcctacctcctagggggaagtatttcttgactttttaatagtccagaaaagagaaagtatagatgcaataagggagaattcctctatgggttggccaacccccagatggtagaggtgacttctgtgagatcagttcctttttatgggtacctacttcaggctacaatttaagacatrttggagatggctgggcttttgaacattattttttctgtttgggtcagctctactaggatactggtcatgcccactatattctgctagtgacacaagccagttagcatttattgagaaccctgtgcactcagcagttgatactgtctggatagtttctactcttagggcagttaggcagaaggccattctagagcaggagctgtggggccagcctgcctgggtttgaatcctggctcctcgacttagcagctttgtgcccttgggcaagccacttaacttttttgccccagttggcctcatctataaaatgaaaataacaagaggtcctactttatagtttttgtgaggcttcagtgagttaacacatgcaaagctttcaggaccctgcctggcacacggtaagcattcagtaaatgtgggatgttgtcattcccttgggaagatgttcattcatcagacatttagagtacctaccatataactggcattgggggcttcaaagatgaatatctaaccttggagcatggaataaatgctaagcatataattgtaaaaattgattgaatatgttgaattaaagagctcatagtctactctgggagtaagtaggcaaactcaaaattttaatccaatgtgataagcagtcatgggggtataaaaaagttttgtgggggtagaaagagggagcagtaatctctgccaagtttctccaccaggaagtttcctcaggaaacctgggagtagtttgtgagatagcagaggggtcccccatgatccctgactttattaaatggaggatatgtttatagataaagccttgtgatccttaatgaaccattcatcacagttccatttctatctaaacttttctgaaccagttttatctttttagcctgttctgcctcaggggataatgagtccctacgtgccactcacacactcactatattacagccccaacagtctgaaaattatttcttttaagctttgagaactttgccttagttctcatgttctgggatgtgtctgatccacaagtgctgtgtacttttcaaatctttacctgttggaggggatgaagtgtggattaaacaagtaaccagagttggttattgaggaaatgtttcctcggaggagctctatttgagggaagcatgtgcactgagastttgtttacaatgtacctgttatctcccacctccctcccccagtcacccctatacacttaagacattctcctcactcctctgcccctttttttctgccctgtgtgtttgtacagggggagcagtaccatcaggcttggaggagaacctgtgtaagatctgcatggactcacccattgactgtgttcttctggagtgtggccacatggtaacctgtaccaagtgtggcaagcgcatgaatgaatgtcccatctgccggcagtatgtaatccgagctgtgcatgtcttccggtcctgagagcttgcatcggtttcttcagtgccttacagggaaatagcctggggtgtctgggctcagggttggccagcttgcagaggagcaagctagtagaaatattgcagggttcccaaaaccaggtcaagcaagatgccatgtcacccctgagcatgcctgtcttcccaggggtgtacctcttggctggcaaagcccaaggccagtgggaacttgtataaatcacatgggtatgttcttggttcagtgatcttggagtgatgatggtaactgatgaacagagaactttccagaacttgggtcctgtcttcctccctgaacctagacagtttcacccctcctcctgtacccaacccatccccaccccatatgggagatgcttgcccatgtgtttcatcaatcagaagtcctcctccccagcacattcggatttaaatttctggtctctccggctttctgtgctttaactatctttgctaaagtctcttgctacattgcctaaatccatttgtttctttggaccaaaaatgttagtttaccagaccgatagtggtccttaggacagattttagaccagtaaacttatctttggtgagaaatgaaatacaaatgctatagaaaaatttcaaagttgttaaaagccacttcattaaatgctgggattggaagctgttggtctcctgacctgactctgggagccaacaaaacatcaggctcccaaactgctgggaaatttgtttctgtctgcaagggatagtgcgtgcataatccctgctgctgcttctcttgggacctgatttgcaccatccttagtttatgcggaaaggggaagcaatgggtggaggcagtggccttctccttaattttggcttggcttctgatccttttcccaactagaagtcttaagccacttttcgctgaaaatgaaatccctcccttatccatggtagttttaaatttggtttcattgaagaaatagatttaggcaaagagcctgtgctcttctctggccagactgctgttgaagttcctggagagcaaatgttaagacagagcacttaagagctttcaggaggtactgaatgagactggattctgttgtaagccgacagttcaagtctttatttcccaggttggtggggagtgaggagaccctactttcattccctttcctagcccactgatttttgggggcaggtcagggagaaagcatttttttttttttttttgagtctcactctgttgcccaggctggagtgcagtggtacagtcttggcttactgcaacctccacctcccaggttcaagctattctcctgccttagcctccagagtagctgggattataggcgcccaccaccacaccaggctaatttttgtatttttagtagagacggggttttaccatgttcaccaggctggtcttgaactcttgaccttatgatccgcccgcctcagcttcccaaagtgctgggattacaggcgtgagccaccacacccagcaggagaaaccattttctaggctctttaggaaggaccatgcaatgagtaggtgatgtatttgagccctcacagtctttacayccctagaggagctggaggacttaagagtttgctgcagaagcgtggccaagcacaaaacacatgatcaggaaagcagagtgttttcccattaccaatggatgaactatgcaaaccctaaacgccttggcagacacctcccaccccttacccctcccatgcagctgaaaaatctgagactagaaccaatcatgactctggatggcagagggaaacctctaaagggacttattacattggtacagacatatttatgctttcytccatcaccaaccactaaacccctttggaggaatgaaataactgcataaactaktcaactgaacactgggccacttacctcartgttatacaaagtcctggatgatttgattctgaaccacagcctttgcaggagttgggggaatcagatttgctcatgaagacatccctttccacttttgtcatgggcagtaaatactatagtttacaatgcctaccaattagcaaaggatcattcmttcagctactcagttcctctgtaaaacaggtctatgtatgtgcaattcagctaagatctagcagtaacttaagggcagaagctggctctctacttacaacctgctttctctgctgaagccttacctcctcttcagtttccctcctagacacaaatcgaaaataatatactgatagctggttagtaacctcagtaagaattaaaactgaggttgtttactcattttgcctttaaatcttttatccccttttggtgaaggtttccctttaggaaaaaaggtgtcaaacaaccctgattttttttttttttgcatcatttttattacaccaaattaaagttgggagttccaagatcccattccagttaatatttaaccaaggtctaaaatttgattttttttaaatctttgaatcctcccttctgcccctcatggatccttggttttaatgatatggaaacatctaattcttagaattattccgtagcttttgctgattactctgagatttcagttaagacttgtttcaaaagacagatagctgactggttcataatacattggaatagttggatccaaactaataagaataagctgtacaggaactagtgctcaatatacattgtataaatttgtggaaatctcttggatgtgaattgttacttcaagtggcttttattaagattttctcagacttacttggaggttaaagcaaacccaaatgtgtattattttgttacagagctctgctttataaytttgtaataaagtttcaatacagacacctgtcctgtctggtgcgaggatgttagaggttgataggactgacaaaagagcctgacagtggttcatgctataatttccacactttaggaggccaaggtgggaagactgcttgagctcaggagtttgagaccaacctgggcaatgtagtgagaccttgtctctacttaaaaaaacaaacaagggccgggtgcggtggctcacgcctgtaatcccagcactttgggaggctgaggcgggcagatcacgaggtcaggagatcgagaccaccctggctaacacggtgaaaccccgtctctactaaaaatacaaaaaattagccaggcgtggtggcgggtgcctgtagtcccagctactcgggaggctgaggcaggagaatggtgtgaacccgggaggcggagcttgcagtgagccaagattgcgccactgcagtccggcctgggcgaaagagcgagactctgtctcaaaaaacaaaacaaaaaaaaacacaaacaaaaaacccaaaaaaaccaaaaaattagccgtgcatggtggtgcatgtgggtagtcccaactacttggaaggctgaggtgggaggatcacttgagccaggagattgaagctgcagtgagctctgatcgccaccgcactccagccagggtgacagagtgagaccctgtattaaaaaaaaaaaaaaattgacaactgataaaccacaagctaatcctgggatgtgcacatggcctgggattagcctgtggttgggccaagtgaccttggtcaagatgctcagtgttgttgtaactaactaacttgctcaagaccacaaatgtaatatatggaagaggccatggaacaacctagaagagaatgagagctgggtaggtaaaggatgaatcccaagaccaattgggttgaagcaccaagtgagttcagatatttacactgatctagaagagatgggccttaaagaactgaaatctgaggacagttagtatgcccagttaggtcttcaggttaccctgggagatacatggtaccttttggatacagctgtagtacagctggactatggctcagaaaaggttggcccaggctgggcgccatggctcacgcctgtaatcccagcactttgggaggctgaggtgcgtggatgactcgaggccaggagtttgagaccagtctggacaacatggcgaaacgtggtctctactaaaaatacaaaaacttagctgcgagtgatggtgtgtgcctgtttgttaagtcttagccacttgggaggctgaggcatgagaattgcttgtgaacccgggaagcagaggttgcagtgagctgagattgcaccactgcactccagcctgaatgacagagcaagagtctgtttaaaaaaaaaaaaaaggttggcccagcctcgtgacagactgctgtgtgtgcgcaggcttgtacaaacctccctgaccaggcgcccaaggagcagggaaaagactactgagaatgcagcccctgggagaacaagattatgtgtccatctgctgtgactgagaagagaaaggaatcttgccaaaagggcataaaggatcgaggatgagccacaacactttgctcacattgccctagggagctgacctgttcagcacccagtgatgacctctgcttgatgccagccagcagcatgtagaggttcagaagagggaggcctccagcattctgctggagagatttatgatgatgatgttgagggctgcattgaaatacatgaaagaaatacatgaaaggatacaaaatagtatatacagtcagatctcagcagcaaagactggaagaaaatacataaaaaaccactgacattgaaatggcaataacacacactaaggcagagaagggacaagatgatcacctgcagccagcagaggccctttcctgtgagtgtgcactctgggtgtaagcaaccaataagggcaagtggggctgggtccaggttggagaggacagtgcctttggcaggatcctgaggagacagccttgttctgctgccctgtccggttgtttgtttggcctgaggctgaagagagaaatggaaatctatgtaggtcagtactcaaaggaggagcagctttttgtctccatagaggatggaataaaaagtatcttattcctaatactgaagcaaggctgaatggtgcctattcaaaaacaccaaatgtcctgggctagagtcaggaaagtaaacccctcccccgtgctgtccctactcccccaacatacacattttaaacagtaggtggaagccaaagtcaatcagatcaaagttgggggggggcggtggggtggccagggggcgcagtggtccttgatcttataggtccagagcctgttaatttgttcataaggtgagaactgaccctcaagagctggaaggattgggacatggcagccagtttacaaccatatggtgtcctgatgagcctgcactcagagtggagtgttggctggaacatgcacacctgcaactgagggttctaaagtcataggttaggcccttctcccgggtagggtctggacatgcacaccaggagtgacgttcccaactctagataactatgtgctaggctctgggctaagtgctttacataatgttgctcaggacaacaggacaaccctatgatttaggtgcacccattctacttggagggattgaggcttagatgttaacgtaacttgcctaaggttagagccattaagtttcaggagtctgatctgaactccgtctacacctgcactgtccagtgtggtagtcactagtgacatgtgaccatttgaagttgaattaaaataagaacttcagttccttagttgtgccagcttcatttcaattgctcagcagctgtctgtggctagtttggttggatactgcagatttatggatatttccactgctgcaaaaagttctattgaatagcacttgtctacactaaattgtctctcttccttttgttcttcaaataaatcagcctcaggtagcacaggagctgttctttgtaagcaggttgtatggatctgttctcaggtgtggatttttatttttttccctgcagatatggagtatattttctttaagaaattaaaaactaagaagaaaatgccactcaacattgttggtattatcaataggtcagcaggaaaaaaaaaaatactgtgataaacttgtctctctgataccaagaagaaattctagtccgagcttcaatatgcttcctgtttttttcgctaggtatttcttttactgctgctcttcattctttcccacatttcatattggaggattggtacagcctttagaacttcattgacaggagcaaatccagtatccactgatttcttcttaaaggcgctctaacccatcagatagcccggcagtttcattcacatgaatactccagccatgaaaaaactcagtaggacacagacgaatccaatgaatagaagaaaaaaaatcgattgagttttgggatatttggtgcatttgactggtccagcattatgaaacctaaacctcccattgtaaacaggaagctggatgcaaatccttccataatatactgtccatttactttgtaggccaagaaagctactggcctctgatgcccacgttcatcagccaatacttgggggttcaacaatatcatataattattcctccagtcatgaggaagtaagacaccaccaccagagcatacacagtcatggctgatggcatgtgcagccagggtggcttcttcaacttcaggttggaacactcgagcactaagaatgggatatggtacaaagtctccatgttggtggcaacaagggctgttcttggcctcaagccccatgtggatttttattcttaaagaacagtcttgtttccaggttttggggatgcagatcttcctggagccctctatccctccagaggagtggcccaaataacctcccctttcttcataaaggccccattttcctacctgaccctagtcccctcccttcaaactggggatcctcaccatgtaataggagaacacagagaagaaagtaaaaaaattcattttgttttctttcacatgaggtttgttcctggcaaagcgtgtcaggctgaatacaagttccgctaaacagaagcatttccgagggcagtcctttaaatacaactttaaaatgagcctggaagtacaaaggaacaggcaaggatgggagagaaggctttgtggacagagctgccatagcccagcctttactccttaatctctagggaaattattgggggtgtaggtggggaaaggacaaagataactgcaagatattttatttataaaaagggtaactaagctgcttttcaaagaaaacaaaaagatggcaaacccagcacccagctctgaaagatctatttaaaccagcaagacaaactgacttcagctgtggcacccacagcaactaattcctggtccagaagagacagtggagaactggtgggtttgggagaagcaagcccattccccctatactgtgtctatctgcctccagcctgagtccagtccagtagtatggtaaaggagagtatggcctgagggagagggaagacagcaaacctagcagggagctaccagtctccgtttccggatacatgcccaaatccactctggggagacctgctgggccgcagggttcttgtccctgctacccagcacgtgcgtggctgaagtcatatcaaattcctgtaccaggtccccgtcgaatgccacaaagtagcgtctgagacggctgaagtctggtgtggagggtggcaagtaaagccgcaccccagtgaagatgtccagcaatacctgcaaatgcagaggggtcagggtggggtcagacctacactgggtacagatgggtcttcacccaaatgagcacgggacagaatgagggagcctagagttaggacacaagcagagaagtttactggaataccatgcatcaatacccccacccctccagtcactccaaattatacaggactgacacgcccctccatccctgcctaggggaaaaggagagtggacaggcctcgacatctgggacctggagatgggaagagtacatgtgtataagagccacccagtcatggtgggcaggcggagctggctctgactcagtgcccccagactcagtgatgtcccctgagaccaagcagtctactctgtacaacctgctagactgaggggtcaggagtcctgcttactactctcaatgggttcaaggacttcaggctgggaagagagaggggaaaggtttctacaggtctgttggggaccgagttcaggccttgtgctgtgagacttctatgcttactcctggatggcggtggggagcgtgggggcgcaatgacatgggtgtcaatcatatgtttacttctctatctgtcctttgaggcatcagctcccccagagttgagccagtactaaacctagttcttggcatcagaaagtgctcaaaagaggccgggtatggtggctcaggcctgtaatcccagcactttgggagaccaaggcaggcggatcacttgaggtcaggactttgggaccagcctgaccaacatggtgaaatcccgtctctactaaaaatacaaaaattagccgggcatggtggcacatgcctatactcccagctactcgggaggctgaagccggagaatcgcttgaacctgggaggcggaggttgcagtgagcggaggttgcagtgcgctgtgattgcaccacttcactccagcctaggcaacagagcgagacttatctcaaaaaaaaaaagaattgctcaggagatgttgccaaacccaagactgacaagaaaatgtaacagggaaaaggctcctcaggtgggaggagagtcaccaagccagtgccctctccccgactcgctgcttgctggacctgcttccaccctgaccacaaactcaatgctgcattcccacacccagactgggcttttccctttaatgtaaattttgacttggggccagcagctgagtgagtccctgcagtctctcctggctaggccgggctgttctatctcctgcctgctggcacagttcttcctctctgctcactggctggccgcctctgcaaggcaacaagaggacatagggtgagcagcagcattgctgaccctgcccacgacagaggagtggctgcaggcagggaagaggtttagccgatgttccccaaacacctttgctcatcctctttcaaacttcttgtacagaaggttgggaacacaacctgggctaaactggcccacgtggtgtgttgctgtttttaccctcacctttgtttggcacagcgtctcatcagcagctttccgcttctcccctactttcactggagaagactttgtggccagcttctcccccaccttcatagcggaaggctttgcagtctgcatgttgcctgcaggacagagaggaagctgggtgtggtggtgcacacctatag

SEQ ID NO: 97443 - DNA, 14104 bp, Homo sapiens
gcagcggaacagagacgtgcacggtgagaggcctgggggccggctgtccagggctcccgatggcttttctcccagccagcaggatcagaggagccaaggtccgacttgggcctggctggttgcccacagccctgctcagagggccggctccctgacccccatggttcaggtttcggtgcccgacgctggggtgggccagcgtggagcctggcctttcagctcagcaggcctgtggaggtggggctctgatggcctatcccagctcgtttcctactctctcctccaatcgggaacaagagggctggagagctcaggtcacccctagcctcgggtgtgtcccaagggcaacccccagctggtgcctggtgaaagggcatgacagcagccacggtgtgagctgtcccagggctcagggctggactgcctggctccagccccctcccccagcccctcgcagtgctcatcagggaccaaggtccagctacagagctcttgcagcctctgggccatagctgccagctctggagggtccagatggaacccagagcctgaacacccctcccctccccccagcaccccctggattcctgaggcctggctcagttaataggagacaggtccgctggcccaagcaaagatgcgggtgccacgagggccaggcctcggccaagccctgctggggtaaatcccagcagcccaggctccagtctcgcctcgggggtccctccttgccagctctgccagcccgtcaggccggctgggcaccccttcacctcctgagcaccccaggtgctcagccctctccccctccccccatgtctagtccctcagagctgtccggactgacgtctgtacctaccccccatgtgggtctcctgctctcccttcgtggggacactaggcaggcactgggccttgccccaagccccgcctgccacctcacccactgcctctgcctccctggggcagagctgttcccagacgggtggggcggggcccaactgtccccagctccttcagccctttctgtccctcccagtgaggccagctgcggtgaagagggtgctctcttgcctggagttccctctgctacggctgccccctcccagccctggcccactaagccagacccagctgtcgccattcccacttctggtcctgccacctcctgagctgccttcccgcctggtctgggtagagtcatggcctcgagcacaggtgaccggagccaggcggtgaggaatggactgagggcgaaggtgctgacgctggacggcatgaacccgcgtgtgcggagagtggagtacgcagtgcgtggccccatagtgcagcgagccttggagctggagcaggagctgcgccaggtatggcccagggcccctcgctgccctccaggtcacaatggggtggccgagttggccccagccccactggcacatgggacaagggctgaggggttaggtagggcacagtctccctgcctgctcccctcccctcccagggtgtgaagaagcctttcaccgaggtcatccgtgccaacatcggggacgcacaggctatggggcagaggcccatcaccttcctgcgccaggtgaggctcctgcactgcccggagcacccccccacccccagcccatgtgccctggcctcagcactccgtcttcccaggtcttggccctctgtgttaaccctgatcttctgagcagccccaacttccctgacgatgccaagaaaagggcggagcgcatcttgcaggcgtgtgggggccacagtctgggtgagagccagggccaggaggaagcagagggccgccctgccactggaggagggaagtcccttgggagagctgaggagaacttcacctgtacttcccatcctgtcctgcccgagtccaggggcctacagcgtcagctccggcatccagctgatccgggaggacgtggcgcggtacattgagaggcgtgacggaggcatccctgcggaccccaacaacgtcttcctgtccacaggggccagcgatgccatcgtggtaggctgggcatgggcaccaagacattcctgacactgcagagggggcgcccagggtgggggacaggtgcggccccaggcctcgccaaccctgccttccccttcctttccgcagacggtgctgaagctgctggtggccggcgagggccacacacgcacgggtgtgctcatccccatcccccagtacccactctactcggccacgctggcagagctgggcgcagtgcaggtggattactacctggacgaggagcgtgcctgggcgctggacgtggccgagcttcaccgtgcactgggccaggcgcgtgaccactgccgccctcgtgcgctctgtgtcatcaaccctggcaaccccaccggtgcgttccccgccgccccgccccactccccccgcgcccacgttgcgttccccgccgccccgccccactccccccgcgcccacggtgcgttccccgccgccccgccccactccccccgcgcccacggtgcgttccccgccgccccgccccactccccccgcgcccacggtgcgttccccgccgccccgccccactccctccgcgcccacggtgcgttccccgccgccccgccccactcctcccgcacccacgtgcgccctggcccaggcagtgccgggtccgctggaccccggctgcccagcggagggcagtgcgcccccttggctcacccagcactgctgcctccccggcaccccagggcaggtgcagacccgcgagtgcatcgaggccgtgatccgcttcgccttcgaagagcggctctttctgctggcggacgaggtgcgcggcgcgggggagcgggaagccgggcaacagtccgcccccgtgacgccttgcgcccttccaggtgtaccaggacaacgtgtacgccgcgggttcgcagttccactcattcaagaaggtgctcatggagatggggccgccctacgccgggcagcaggagcttgcctccttccactccacctccaagggctacatgggcgagtgcgtgcgtacgaggcgggtgggggctcgcgggccatggccaggccctcctcgcccgatgggccaccccctcctccgcacctgacctggccgtgcgcaggtgcgggttccgcggcggctatgtggaggtggtgaacatggacgctgcagtgcagcagcagatgctgaagctgatgagtgtgcggctgtgcccgccggtgccaggacaggccctgctggacctggtggtcagcccgcccgcgcccaccgacccctcctttgcgcagttccaggctgtgagttgggggcaggagggggtccaggtgacctaatcaggggtgggggatgccgagtgccgtgccctgatgggccctccctccgcggccacaggagaagcaggcagtgctggcagagctggcggccaaggccaagctcaccgagcaggtcttcaatgaggctcctggcatcagctgcaacccagtgcagggcgccatgtactccttcccgcgcgtgcagctgcccccgcgggcggtggagcgcgctcaggtcaggcgggggcggggcctgcggggtgggcagggggggccgggcatccctctctgacggctctccgtccacaggagctgggcctggcccccgatatgttcttctgcctgcgcctcctggaggagaccggcatctgcgtggtgccagggagcggctttgggcagcgggaaggcacctaccacttccggtgaggcctggccctcactccctgtcccgccaccctggcccttcactcactgtcaactcctttcaggatgaccattctgccccccttggagaaactgcggctgctgctggagaagctgagcaggttccatgccaagttcaccctcgagtactcctgagcaccccagctggggccaggctgggtcgccctggactgtgtgctcaggagccctgggaggctctggagcccactgtacttgctcttgatgcctggcggggtggggtggggggggtgctgggcccctgcctctctgcaggtccctaataaagctgtgtggcagtctgactccagggaggaagcgttggcagctgcgtggcccgctcccacctgcctacccttcttgcaggcctgagtcccttcagagaagggaccttccacggccaccacccacctcttcctcctgaagaccccgtgcccaccataggctgggtcttccctctggcctctggttgtggggcagagcccgtcagatcacacagaaatgggttgagagggtccagagtgtgaggaaagcgcaggccccacacccctttgtggaagcccccaagaatctagggagccaggggcccaggtggccacccgaagaaacacagcctttcctgaggaaggcacagtgaactgcctccttcctggctccctttcctgtgaggtccatgtcttccctggggcagggggaaatactaaaccagcatggtgctggctggtcagggtgactgacagctcaggaaggaagtcttggttctcttacccaaggaagcaggggtggggccactgtctggggggccagagaccacctttggtgtcattgtgtggtgcagtccttcggctgggtggagtgggaggcagagggagaggataagggagcgtcccaggggagggctggggctggaggaggcaggggctgggctgagcgggagtgggcagcgctgtgtcctggcctggggagcatggctgagcacctactacatgcagacactgctggggggtcactcaatctgcacagatgctcttctgaagtaggcatgatagtccccatttgatagacgtggaaacctgcaacccaaaaacctgctgagctgacaagaaaccccctcagaggcctcggcagccagaaaaatgcgttgggtccagtgccctcaagtccgccaaggacagggctggctttagagactcacaaacttgggagataggactggccaagggcacctggtttttttcgctctggagatggttcttaaccacaggccacacacacttcacagcctcatctggccctcgggagccccagagggcacagctctgggcaggagacacagcaggtgggcccctcccttggcagggcgggctcgaatcaggcagggtgctcctagccttgtcaccggacaccgaagggcgtcacgggcagtggctggcggtgtccttctgagctaagctgggtcctgacctttcacacttccctcctaacttccatggctctgtcaccgccttacggaggagctgaagccacagacacagcaaggttggggtccggcaccggaagtatccagtggtagacggcggaacccttaagaaacggacgccttcatgcgggcggctggagaagcgggggctgggcactgcagcaaccacgcttcggctgacaccaggaaggaagcacgcctggagcggatccgaaactactgagaggggccagggctggccgtgggcgcaggccgatccttacattcgaggccggcccagctctgtagcttccccctctgggcctctcacccgcgcaggacctcggtgggagcgcgcacgtggcggggcggggggccgcgggcccgagcccggactggccaccgggggcgcccgcgagctgacgctctggcccgttgcggtctctgtggcccgcgcgaccttccggccctggagccggtggccgcggggctccagcgacgccgtgtggtccgtgctccgctctgtggctccagggggccgagaaactgctgagagtccggcccggccggcagtgctgggcgcgggccgagggccccgggaggcagcggccccgccctctttacctgcggcctcgcagagcatgctgggagccgcgggaggcagtggccccgctcccctcacctgcggtatcgcagagcatggtgggagccccgggaggcagtggccccgcccccttccctgcggccgcgcagagcatgccgggagccgccggccgccggtgtccggaccgctcgcccccgtttggacccgacttcggttcttctggggtgttgatgctcctaaagcccgagagcacgtgtccagaccctagcctgtacgacgctgactctgcccggtcccagaaccaaagccatgccggggtgtggcctctgaccccacgcggaggggacctcgccttgcgggaccccacctggaacccgacctcccagcctcgcagccggcctgagccgccatgcgcgggaagttgctgccgctggccggcctctacctggtgcagggcctgccctacgggctccagtccggcctcctgccagtgctgctgcgtgccggcggcctctcgctgacgcgcgtggggctggccaaggttctgtacgctccgtggctgctcaagctggcttgggccccgctggtggacgcgcagggctcggcgagggcctgggtgacgcgcagcacggcgggcctgggcctggtgtgtgggctgcttgccgggctgccccctcctggagctggccaggccgggctgcccgccgctgtggcggggttgctgctgttgttgaacctgggtgccgccatgcaggatgtggccctggacgcgytggctgtgcagctgctggagccggccgaactggggccgggcaataccgtgcaggtggtcgcgtacaagctgggggccgcgctagctgggggcgcgctgctggcgctgctgcccaccttctcgtggccgcaactctttctgctcctggctgccacctactggctggccgcggccctggcctgggctgcaccagccctgcggcggctcccacagcagcccccttccgagcagcgtccccacaccgcgcaccttctgcgggacgtgctagccgtgccggggaccgtgtggacggcaggctttgtgctcacctacaagctgggtgagtgaggcctcgagccaggcaacagcagttggggcttccgggacagctccaggtgtgtccccaggggcttgcaacccattacagggccacgctctttctggggtatgacctgcaagacttggccctgacatccggggctctgcagctgggccttgtgtcttgtccgcccccagctctagccccatccctgagcgctctctcgggctgccccacttctcccccagtatctgcagctctggaacactgaggagagcagggcaggactgagggcccaggtggggagaagggaggtgggggcagatatggaacctcccgtgctcatgccccccccaccacccaaggtgagcagggtgccagcagcctgtttcctcttctcctgctggaccacggcrtttctgctcccgagttgggactgtggaatggtgtgggtgctgtggtctgctccatcgctggctcctccctgggwgggaccttgctggccaagcactggtgagccctccccagtgtaccctgcccacccacttgtacctgagctgcccccaatccactatactgacccatttcccacccccatcccaggaaactgctgcctctgttgagrtcggtgctgcgcttccgcctcrggggcctagcctgtcagactgccttggtcttccacctggacaccctgggggcyagcatggamgctggcacaatcttragaggtgaggggctggccttgaggaggaagagaggggccaggagcctggggcactgctgacttctgccctcccagggtcagccttgctgagcctatgtctgcagcacttcttgggaggcctggtcaccacagtcaccttcactgggatgatgcgctgcagccagctggcccccagggccctgcaggtgagtagatgtagcagggacacaagagagaccacggggctggggctgtgtgggcctgaccttgaccgtgacccccacccccctcaggccacacactacagccttctggccacgctggagctgctggggaagctgytgctgggcactctggccggaggcctggctgatgggttggggccacatccctgcttcttgctcctgctcatcctctctgcctttcccgttctgtacctggacctagcacccagcacctttctctgagctgagtggctggagtggtcaataaagccacatgtgcctgtggcccagatgtctctgtgcctggaatatgtgatgtgcttgtccccagcttgtgggggttgcctcattggccaagagggcccataaaaacaaagtgagcattttttattctgcattttggagcctcctcgttcccacaccctgtggcaggttttgcccaggtcctcagtcactgccctagcctctgacaaccccagctctacccgacatcccccaatgcagtgcagtcagcgggccacctgcaggagctcttccgtggccaggcccaccagggcatggaagctcaggtgcaggtattttctccagaagcgtcggtcctgcccgtacacctgggccgggtagcaggggcttcctacggtggagccaagacacagccgtgagccccagccccagcctgcagcgggtggagcctcccaggcctcacctgccccagcccccagccccagcctgcagtgggtggggcctcccaggcctcaccgatgccgtggaagatgcgggccacagccctgctggagaacttctcctctggcctcagggacaggaactggcggatgtcgcagcggacctggtcctcccaatcctggagctgtgtggacaggcacatcaggcttcctctgagctcccgtggcactgcatccacagagcaagccccatgcagcccagggaacctgcaaccccgatgagctgcctggccttactacactcactctggcctgccctggctcggggccctgtgcgtcctccatgcctcccggctcctgcccttcctcttcctcaaagtagcggccgagcaggtccttgagcctggtgctgcgctcctcatcctgctgctccaggcagggcccgcagctggggaaggctacgctgtggggaggagcctgtcagagctgatcactgcgggagggtggatggtcccaggccccgcccacctcctcccaacctgtgaaaggcctggaaggttctgcgcagacgggccagggcctggcgctcccgggcctgcacacggccatagaggaagtcacatatctggtccttctcctcagcggtcaggtcccccgggctgcgaaggtggaaggccagctcactgaactccacaagcacccctgtcccacgccgcacacctgccggaaagcatgtcagatgcaggcaggcagcgtccagggcggtgtggggtggggagaggcgcacctgtcctgggctcgtggtcccactgcagctggcagagagcctgccgcacagaggccagctcccagcccatggagtccaccagcttgaccatgtcaaactccacggagctgctgccttgccctgggtcctcaggcagctgctgggccaagcacacagccaaagggggacacctgtgcccagggaaaaagggacatgtggccaacagccctgattctccaacctcgtctccaactgggcagggcgtgcttacctgtgggccagggcctggagctgggcagggcccccagggcagttcagacggcaatgggtataggtggtcgccagcagctccagccagtggtgtgggtgcagctccaggtagcacagcaaagtctcgatggctgggggcagagcagggctcagcggacgcggggacagcccctccacacccctgtggcttaccccaggttcctcaccctcctccggcatgtccaaagcctgtacggtaagctgtattgggagtgcccgctcatggcccatgcagacccttctgggtcctggggctgcttggtggctaagctgctcagcctcttgaggggggtacttgggcacaggcctctccccacccacggccccttcctgctccgagggcggcctggtgcaggtgcaggtgcaggctgggaacacgcgctgtaccagcctcttcacagccaggaagtccgtgctgtcggcgtgcacatgtctgcgcagctctcgcaggtcttcgccctgcagggcaactttcatgagggtggggtggaccactgggggctcgagcactggcagtgtggggggggggtgccaacctggggctgcaggaagaggtggcagtgggcaggctgcccgtcacgcccggcccggcccacggcctgcacgtagctctcgaagcttgggggcagccccagatgcagcacagcccgcacatctggccggtccagccccatcccaaaggccaccgtggccaccaccacccgcaactggccctgcatgaaggctcgctgtacccgccgccgttcccggctgcacatgcccgcgtggtaggcctcggctgtggttttgggggcacgacctttggggaagacaggcagatggtcagtgggatgggaccatgtgtgcccaaggtgggtccacggggacaccagctctgtccatgccgcacctccagaccctgggacccaggctgcgtgcaggcaggttcggaggagcgcagcgatccgctctgtgtcctcgcgccggttgcagtaaatgataatggaatcgaggttttgaaaacgtttgccttgcagcagcgtcaacagtgcctgatgaggagcggttggcgtgggcagtggggagtgaggaggggtcggcgtgtgcagtggggagtgaggaggggtcggcgtggggagtgaggaggggtcggcgtgggcagtggggagtgaggaggggtcggcgtgggcagtggggagtgaggaggggtcggcgtgggcggtggggagtgaggaggggtcggcgtgggcggtggggagtgaggaggggtcggcgtgggcggtggggagtgaggaggggtcggcgtgggcggtggggagtgaggaggggtcggcgtgggcggtggggagagaggaggggtcggcgtgggcggtggggagtgaggaggggtcggcgtgggcggtggggagtgaggaggggtcggcgtgggcagtcagcagccagggccctgcagggtccccagagcacacacacccacctggtctgtgtccctgtccatggacacggaaaggtgcaggttggtgggaactggggctggcccgtggaggtcaggctcttcagccacagccaggtgctgtgccacgtcactggcagtgcggcgtgtggctgtggctgtgaggcccaggaagcagtgcacgcccatgcgctcccgaagcacctgcaccagaggcggcagtggtgtgaggccgcccagcccatcccggccctggccgcccaccccagttcacatatggctcaccttgcagacgcgcaggtagcagggccggaagttgtgggaccactgggagaggcagtgggcctcatcaatgcaggcaaaagcaactggaggcagctgtgcggctggagggaggcctcccgcccccaccagtgcctcaggtgtcagcatcagcacgtgtacctgggctgcccgaatctgaaggcagcaagatcagaggcacagcccaggtgcccgcccgctgcctccctcacccctaggcccatgaggcccccaccttctgcaggacagattcccgttgcttcctggtcatgcccgagtgtatgcaggccgccttgagacacggtggcaggccagacacctgcaaatgcaggagcgacagccgtcatacgccagcccagccctggcccttccccaagtcatcccagagctgctgccatgtccatcctagtccctcaggggagaggagaaccaggtcctgggtcctagggctaagggtttagagccacctgtgggccttggcccaggagccccagagcagacagactgaagtagggatggctcctttcccagcacatttcccgtaggggtggctgtggtgcctgtggagctgggctgcctttgacctgctgccaagactgggactgaggccacagacaccttgaagctcccaggggagggggtggttaggggacaagcagcagttgcccttgggagtcacaagtgctggttcttggctgtgtacgtgtgcccagggccctgtgtgcacacctggtcatccatgagtgacagcaggggagagacgaccaacgtgaggcaggggctgcgccggctgtagagcagcgctgggagctggtagcacagggacttgccggcacctgtaggcagcaccagcagcgtggagatgcctggatggggcgggagtcagcagcagggttctgcagcctggcctcagcccagcctcagccctggcagccacgctcaccagacaggatccgcatgactgcacgctcctgcccagggcgaaaggcttggtgccccagctgctccagggcctggaacacctcagccggcgtctctgcagacacagatgttgatcaccatgacttgagtcaccccaacccctcagtgaaggctctgggccagaagctgactgctcacctgccaactgccctgagggccccagggagtagagtggcagcacggtggggtccaggctgggcacctcaggtacaggttgtggtgaaggaaccagtggctcaggcccaacagcatctgtgtcttcctcacttgctggggcaggcaggagagggtagaatgggagctccaggtcgggcaagacaaccactggccacaacctctccttcccccaaagggggttggcagcaggcagtgcccttcctctgggctactttttccaaagcagaaaagagtgacagccatcgtcgtccctgccaccctccttcaggggagctagggtagggcctggaccaggggtacctggaaggcctgttgcttggaacataagtgtcccccaaaagagcactgcgccctctccacagtgttggccggacccaccctccagggcagatgtctcacctggccggggacactgggctgcccagtgatcgaactgctcgttcaggaaacaagactccttggttgtgactgtggcaccaccacccccaaaacactcccctttcttccgccacttctgcttccatgcctggggggtgcccacataggagggtcactgggcgggaaatacgggagggctgaggggagggaaagggaatgcctgtcctggcccgtcgctgtcttacctgcttgcggaggagcctgctacggagtgcccggccccgcacgtagtgtttctgcttcatgttgagccgtacgtaattgcccctgtcatggcgggccagccgagggaagatgtgcaggggggctgtgccctcagccttcccagccctagcttgactggaggggctgagtccgtggtacctggggttcgatgggctgctgcagggctgaggtggctgtgcctgtacaggttcccctggagggtcttcctcaactgctacagccccagccccctccgatgggggtccagcttggctgctctcctgctggacctgtgcggggctctcccaggggtcctcgttccatctccgcttctcgcctccactgctgctgggctgggggctccccacacggatgctgacttcttggaaggctgaagcctctgggccctgggagccagcaccaggaccaaggacagccgactcaccagggatcagaagttgtgattcctctgagcctagatcaggcctgcaggctttgggggcccccagaaaatctgggacctcactgtgacatcgctgtaaccagccaggatctagggagcccagccgctggctcagggatgcctgcagatgctggagccggcctggccttggctggggctcagggagctgtggaggctcatcactgactttttctgcaaaggaggggacaggccctgtacctgggggctttggggtggatgccttagatgaggctcttcctagaggccacggtctgcggcccagggctggtccggcctgggaggggaacaacagaacagcaggaggaactcaggcccctgagctactgtagactctaaaacctacctgagtccccacgctcaattgtagagcaggctaattagcacaaggctggactagaaagggagtcaagggcgaaggccccgagaagctccctgaagactcgtgccctggttggcacaggggcccgtgcctgtctgtgtggaaaaaatgacaagagggcgacccgg

SEQ ID NO: 97444 - DNA, 12882 bp, Homo sapiens
gtaagaatcaacaggaacctaggatccatggtcagccagcccccaaggtagaggaagctgctcaggtggacagagtcccatctgcatgtgctccactttgcatggcagctgagggacccccaaaatactctgcattaggctttctatcccggaggtcactgcagtttatcagcacccagacatccatcctgggtgcctgccctccgttctattccctttccatcttttctctgacttttgtgatgattatttctcttgtgtttttcttcatcagcatttattttaagttccagggcacacatgcaggatgtgcaggtttgttacatagctaaacatgtgccatggtggtttgctgcccagatcaacccatcacctaggtattaagctcagcatccatgagctattctttttgatgttctctctccctcgactatttctttgcttttctttacaattttgccacctaaatttgcatctgtaaataatacagatgattttacctgtttcggtacttaacataaatagaattttactgtttttctttgtcttgccttttttttttttttggttcaaccttatgtttgagagattcatgatgtgtgtttttacaagttgtagtttgtggattgtcagtactgaatatatcccattgtatgaatacaccacaattttatttatccattctactgttgatgggctttgggttgtatctagcttttcactactgtgaacaatgttacaacgaacattcttttacattctgaaacacatgtgagtgggtttttagagtatatacctaggggtggagctgctgcgttggagggcgtgcatatcattaatttaataagatgtaactatttttcagagtggttgtacatatccctgattgctaaggcattagttatgtacatgactgattatattgagggttttaaaatatacttatcagtcatttggatttcctcttttgcccattcaagtctattgcccactgggttgtctactcgaattatgtatgcattctggatactagttctttggcagttatagatattgcaaatatcttcccccactctgcatcttgctttttacttttattcaaacgaattagaataaacatcttagtatatgactcactgtgctcctgtgtgggagtttccacaggggagttgccggaaaatggacttactgtgtcgtgcacattttaaatgtcattaggcattaacaatttattcttcccttagcaatgtataagtgtacactttccttcatatccttgccacatgtattatcatcaaatgctttcagtttttgacaatccaataggtaaaaaatatctcaaggttatttgaattttcatttcccttattaattcttcatttaaacgtcttttgtgtgtgtgtgtttactttcatcaagttgtttcaccagtgaagataagaactggtatttaccttctgcatttaatagaattgatgcaactggctgagcgtggtggctcatgcttataatcccagcactttgcggggccgaagcaggaggatagcttgagcccaggagtttgagaccagcctaggcagcatagtgagattccttcactacagaaagtaaaaacctagctggacatggtagcgtgtgcctgtagacctaactactcggaaggctgaggtgggaggattatttgagcccaggagttcaaggttccagtgagctatgtttgcatcattgcacctcagcctgggcaacagagcaagaccctgaccaactccccacccccccccaaatcaatgcaacctgtgatcactttatttgggcaacttccccaaattcttgactcagtgaatttgttgcagggcttttcttttttaatctcttttattggttcacatactagaacaatctcaggggctatctggttaggtattgcttgctacagagccaaactatgtcaccagaacccatttatatgtttccatttcttgtctctgtttcctcggccgtggcatccttctcagtgtcataatacccaagcagcaggggcttcagcctgagttcttttcccaggattcctagttaaagttcttctgcctcattggctctaatgaagtcacatgcccatctctgaactaatcatggtggccaaggggatgagacgtgctgattggttgaggcctaggtcacatgttctatcctgagctgggagtggatcctcaccagaagtacatttgagagtttgggggaggggtggccgctgggatgagataggaaataacttgtccacgctgtgaattacccttcaattaatgatattttctatttagatgtcagattttttgttactagtttgtcatataaacctattactatatagatttttctgtgtcctaatctaaatttcttttaataatctatgggtgaacactcaataagaatgtcctccagaaaggatgacctgccgacttttaaagcaatcattttggggcttataagtatttagtatttgaagtctctgcctcttgctctcttttaggaattctttttcctactgtgatatatgtaagtacttataaatttaaacttaaaattcaaaaaatataccaggatgtgaaagaaacattattaaatataggtgttttgctgtgagtgtttcttggaataggtagggctttgtatagtaggttttggtcttttggtcagcttgggaaaattttgttcttttttaattgaatgatatgttttcaattgatactactaaaataaacattattggagtattatttacatgcaataaagtgcaccgttttaatgatacatttctgagttgtaatgattttatttagctgtgcagccatcaccacattcaagacacggagcactccattacccagtaacttcccttctgtcctatctcagtcacctaatacctcccctcaccttaggcaaccctggatggtttctgttgctggataacagaattgtcttttctagagtttcatctgaatggaatcatacaattatgaatgaaaaacacacaggtatactgttttgtgtctggcctctttggctcggcataatgtctcttcagatcctttcacattgttgcatgtatcaatatttcattcgtttctatttccgagtagcatttcattgtatagatatatcatcatttgcttatgcatttatttattgatggacatgtggatagtttccagttgttggctattatgaataaagctgctatgactattcgagtacgagtgtttctgagatttcatttttcttgggtaaatacttaaaagtgggattgttgggttgcatggtaggtgtatgtatgacttcataagaaacagtcgaactgtttccaaagcagttatacaattttacattcctaacagcaacgcattagagttctggctgctctgtatttgtgctaagacttgctatttttagtcttttacattttagccatcctaatgggtgtgtagtagaatttcattgggtttgaatttgcattcctcttatgactgatgataatcttttcatgtgcttattgatcatatgcctgttttcttttaaaaggtgccctttcaaaatcttccgcacacctttattggtttgtttgtcttcttatatttgagtagtgagttctttacatattctggatacaagtgctatgtcagatagttgtgtttctgtttacttctggtgtgtggtgtcctttgtttcattttttaaaaaacaacgtctttcaaggagcaaaagttgcaagttttgattaagtcaattttagcaaacgttttgtgttttgtacccctcgtgccctatctaaggaatctttgtctaccaaaaggtgggaggatttgtttctatgttttttaaaaaagttaaacagtttaagtttgtaggtttgggtggaaagaggtctttagaccacttagtctttgtttaggtctttgtttatgtctctgagattggcagaggggaatatacaatcattcagatcaggctattggatgcctttttctatctctgaatttttctggggtgacctcactgacacccatggcttcaatcaccacttatgctgatggctccaagtctatctgtgcagcccagacccctcctcatctccagaccctggaagctgatgccttgggctgctcctcctatttcctgggcaccaggaatatgagctactccctccccacagtcctgctctccccagtgctcccatgtcgctgaaggcaccaccatcttccaagatacatgggcctccccagggtctaggagtcctagacgtgggagtagaaattagatgacattggtgtctaaacaaaacaccactgcatggagatagaacaggggagccccctgaatgtggtgagagcaccctcccaggtgtgttccaccctcaccccgggctcatcaggagggtgcttaggatgcatacagttttaagggggttggaggaatagttcagaggctgagatgttgcacccacagctgagaatccctttctagcgctctgtgtcctcacaactccccgggaatcatcctcccctggagagttcccaaagcccttgcaggcctgccttctctgtgccttcctgcctgcgccctctggtggacagctccattcgctgcctgtcccatgggttctgtccaaaggtggaatctattatcaatgtggatttctaatgggggtaacttcctccctaagggaagcctcagcttcaccagcaatggcagacacggccaggcatgtagacacagaggaagtgagatagaaagtgtgcacagcccagagagcctgcccacatcatcctggggcgaccaggacaaggaggcgtcagcaatcttgccaagcacaagtatgagtgactttctggagcaggacgagtctcatgggcgtgagaccattgtgagtgctcagggtctctccattagaaaggcacacgtttaattctccattttgaaatttgaactagagcccccacaaattattctgttctggaggaaccattcttatcagaacttggtgctggattgacttggaaaaaagcctgaccataatcttcaggatgaaataaaggcctggatgaatggacacttcagtctctaagcagacttgcagaagactggagccttcagcattcagaagaggaattcagactgtgcaagatctgaggccaggctccagctcccccggtcccttggtgagcaggagctccctgaacccaccatgggtctttgctagggttgtcttgcacatgtgtgctttagacagcagcacctcttcttccatggtgtagatggagaatcctcaacaaagcctttccaagaatctgatcatcacatcttgagctcagcctccctgcagctttttttatattgacagccacttcagagagagtcctctttgagctttacaagaaatatcctggtgtgaaaaacgaccaaaaccagatagccagcctccccactccctgtttaaagaaagctggcttagcaatgttgtctgcattttggatgtgctgtgttacccatatgtgggaagaaagagtattaagagttagcaaatagggtcacatccagcagagaccatatggttggggactagggcaatggtgactcctcagacctcagctgcagcctgataaacgtggttaagagagaagtaggagacagtgacatgaaatgggggttcacagccttgtgttgggaattgaatgagaaacaagagcttgaacttggatgttccccagagcgagcgcaaggtcagatgagtttttcaagataggagtgatcggtctttcccagggtggggcccataatgcaagacaattatagattaacgggtaataagtaactggaggagggcactctgtcttcaattacatgttgatttgctaggtgtctcagtgacaaggtaattaagacgaaggaaacaattctaggaggcacaacgtggggtggacagtcagctgtcggtggcttctgctgagatggccacaggactccaggttcccctgccgcagctggccacaggactgctgcttctcctcagtgtccagccctgggctgagagtgggaaggtgctggtggtgcccactgatggcagccactggctcagcatgcgggaggcctygcgggasctccatgcgagaggccaccaggtggtggtcctcacccyggaggtgaatatgtacatcaaagargagaactttttcaccctgacaacgtatgccatttcatggacccaggacgaatttgatcgccttttgctgggtcacactcaatcgttctttgaaacagaacatcttctgatgaaattttctagaagaatggcaattatgaacaatatgtctttgatcatacataggtcttgtgtggagctactgcataatgaggccctgatcaggcacctgmatgctacttcctttgatgtggttctaacagacccctttcacctctgcgcggcggtgctggctaagtacctgtcgattcctgctgtgtttttcttgaggaacattccatgtgatttagactttaagggcacacagtgtccaaacccttcctcctatattcctagattactaacgaccaattcagaccacatgacattcctgcaaagggtcaagaacatgctctaccctctggcyctgtcctacctttgcyatgctgtttctgctccttatgcaagccttgcctctgagctttttcagagagaggtgtcagtggtggatmttstcagccatgcatctgtgtggctgttccgasgggacttygtgatggaytaccccaggccgatcatgcccaacatggtcttcattgggggcatcaactgtgccaacgggaagccactatctcaggtctgtattggtgcctttatccaatcaatgttccaggcaaaacactttttaaaaaatgtatttacttacaagtgcttccatatctacttatctttccaaagatttcatttctgcttctcattgttgtaatagtcttcagtgagataaacttttaaagggtcaatggtagtgcagttcagggtttcaatggccactgagaggaaggagaggcagggacgaggatctgtcaaaggatgggcaagagtggtgtgactcacggagactgttcgtttgtaaaagcaccatcttcatggctgtggatgtgcttcagctgggcaggagcagggacactacactgagaactgatccatccaatcttgctggcaagattttcagtagaaaggaggaaggaatagaaatttacaattgttgacgtgacaatttttagtggtcccatcttgcaaaagatagagaggtgaccacaggagacctaagcactcagaggaagtagaggtttcaaagaagttgactcagttcagtggaattgggccaatgtaggtgcaatggatgtctgtgatcagagaatgaaacacagagttcagtttccagagagggagtgttggattgtaataggagaatgtttcttgtgaagacactacttaaaaaaaattcttactaggttaacttcatggtctaataccgaagtgtccaatagaaatatcatgtaaaccacatacataatttaaacttttctagtgggcatgttaaacaccagcaaaaagaaaccactaaaattaatgtgaataatgcattttatttaaccagatgtatcccaaatattatcctttcaacatgtgaactgtttaacgtagctttttttgttgttaagtcttcaaaatctagcatatatttgacacttacagtatatctcaatttggaatagccacatttcaagtgctcaatattcatatgtagttagtgacaacaatatggtgaatgtttataaatattccatggataaaactaaaattctatcttttaaatttttctatcttttgagatggagtcttgctctgtcacccagtctggagtgcagtggtgggatcttggctcattgcaacctccacctcccaggttcaactgattctcctgcctcagcctcccaagtagctggaactacaggcgcatggcaccacatccagctaattttctttttttttgtattttttatggagatggagtttcatcatattggccaggctgatctcaaatgcctgatctcaagtgattcactcacctcagcctgccaaagtgctggaattacaggcgcgagccaccacacctaggcaatttttctatcttttaaaagaccctctactgaatctgcccaattctgtgaaggatgtcttttaaaaaatccccttacataacaaattctcctccagttatattttggctcttgaataggttttgctttatacatagtgattagattggtgcatgtaggtttgaggtttgagacttatattttcttcacagtttgctgttatcattaaataataatccttaaaatacattttatctgatatcagtaatgtgactcctatgttattttttgaattccccatctcttttaatttgaaaatgatttgtgtgcaagtgggtagctcacacctgtaatttcagccctttgggagaccgagggaggaggattgcttgagcccaggagtctgagagcagcctgggcaacatgctgagactccatctctacaaaaaattaaaaaattatccaggtgtgatggcgcacacctgtggtcccagctactcgggaggctgaggcaggaggatcacttgatcccaggaggtggaggctgcagtgtgccatgttcacgccacctcactccagcctgagtgacagagcgaggacccatctcaaaaaaataaaaatttatttggaatgtgaaaatcttgttttaaagttagaaaacatttttttaaaactccaatatgaaaagctgggtgcagtagcttgtgcctgtggccccagctacttgggaggctcaggtgggaggatcattgagctcaggagtttcagctcttgtggtttgttgactgactgactgattgactgattgattgatttaaaacacaacaaaacccaaaatgactttaatctgatagtttcttttgatgtcagcattctgattctgtccattcttagttgtattctttccactgagtgtaagctcattcctttaacagaaatttagtttttccatcttagttttggaattccatggcccttttccatttccatggagatgcagtgcagcatcttcaagtctctaattcttacatctgtctctttcacttgcaagagcccttgtgattacattgtcctgcccggacatccagcataatctccccatgtcaaaacccttaatataatcacatctataaagtctcttccacctgtaatggaatatattcccaggtttgcgcaactacaatgtagatactttgtggggctgtgattctgcctaccacagacactaagcttaaagtgaaacccacatcttattcaaaacttggaggttttccttcatttggccatttaaatttaatttttgtttctgtcctccgtagtcttctattctccaggcttcagagctctcagcttaccattcaattatctcctttctctccttatattccttttttcattttttaaaaacaatactttcaaagagcaaaaattttagaatttgatgaggtttattctagtgaagtttttatcgtttgtactttttgtaccctaaggaagctttgtttaccccaagatatagtttctacattctcttaaaaacactaaagagttccagtttatatgtttagctctgtgagattgggagaggggagctagatcactcaggtcaggctttcgggatgcctttttctgtctctggacgttgctggggtgacctcactgacacccatggcttcagctaccacatatgctgatggctccaagtctatctgtgcagcccagacccctcctcatctccagaccctggaagctgatgccttgggcagctcctcctatttcccaggcaccaggaatgtgagcttctccctccctacagtcctgctgtcctcagggcccctatgtctctgaaggcaccaccatcttccaagatacatgggcctccgcagggtctaggagtgccagacacgtaaccagaaatcagatgacatcactatctaaataaaacaccactacatggaaatagaacaccactacatggaaatagaacatgggagccccttgaatgtggcaagagcaccctcccaggcatgttccaccctcaccccgggctcatcaggagggttcttaagatgcagacagttttaagggggttggaggaatagttgagaagctgagatgttgcacccacagctgagaatccctttctagcactctgtgtcctcacaaatccccagaaatcgtcctcccctggggagttctcaagcccttacagacctgccctctctgtgccatcctgcatatgcctcccttgagctgggtgtccctctgatggacgcatccattcactgcctgtcccatgggttgtgtccaaaggtggaatctgttatcaatgtggatttctaatgggagtaacttcctccataagggaagcctcagcctcaccagcaatggcagacatggccaggcatgtagacacagaggtagtgagatggaaagtgggcacagcccagagagcctgcccacctcatcctggggcgaccaggacaaggaagcatcagcaatcttgcgagcacatgtaggagtgactttctggagcaggacgagcctcatgggcatgagaccattgtgagtgctcagggtctccccctagaaaggcacacatttaattctccattttgaaatttgaagtagtgcccccacaaattatgcagcccgttctgttctggaggaaccattcttatcagaacttggtgctggattgacttggagaaaagcctggccataatcttcaggatgaaataaaggcctggatgaatggatacttcagtctctatgcagacttgcagaagactggagcctttggcattcagaagaggaattcagactgtgcaagatctgaggccaggctccagctccccaggtcctttggtgagcaggagctccctgaacccaccgtgggtccttgctagggttgtcttgcccatgtgtgctttagacagcagcacctcttattccatggtgtagatggagaatcctcaataaagccttcccaagaatatgatcatcacatcttgagctcagcctccccggagcttttttttatattgacagccacttcagagagagtcctctttgagctttacaagaaatatcctggtgtgaaaaaagaccaaaaccagatagccagcctgaacactctctgtttagagaaagctggcttagcaatgttgtatgtcttttggatgtgctgtgttattcacatatgagaagaaagagtttcaagggttagcaaatagcgtcacattcagcagagaacatgtggttggggactagggcaatggtgactcctcagacctcagctgcagcctgataaatatggttaacagagtagaaggcagtgacatgaaatgggtgtccacagccttgtgttgggaattgaatgagaaagaagagcttgaacttggatgttccccagaggcagcacagggtcagatgagcttttcaagataggcgtgattggtctttcccagggttgggcccataacgaaaggcagttatagattaatgggtaataagtaactggaggagggcactttgtcttccaattacatgctgatttgctaggtggctcaatgacaaggtaattaaggcgaaggaaacaaatgtagcaggcacagcgtggggtggacagtcagctgtcggtggcttctgctgagatggccagaggactccaggttcccctgccgcggctggccacaggactgctgctcctcctcagtgtccagccctgggctgagagtggaaaggtgttggtggtgcccactgatggcagcccctggctcagcatgcgggaggccttgcgggagctccatgccagaggccaccaggcggtggtcctcaccccagaggtgaatatgcacatcaaagaagagaaatttttcaccctgacagcctatgctgttccatggacccagaaggaatttgatcgcgttacgctgggctacactcaagggttctttgaaacagaacatcttctgaagagatattctagaagtatggcaattatgaacaatgtatctttggcccttcataggtgttgtgtggagctactgcataatgaggccctgatcaggcacctgaatgctacttcctttgatgtggttttaacagaccccgttaacctctgcggggcggtgctggctaagtacctgtcgattcctgctgtgtttttttggaggtacattccatgtgacttagactttaagggcacacagtgtccaaatccttcctcctatattcctaagttactaacgaccaattcagaccacatgacattcctgcaaagggtcaagaacatgctctaccctctggccctgtcctacatttgccatactttttctgccccttatgcaagtcttgcctctgagctttttcagagagaggtgtcagtggtggatcttgtcagctatgcatccgtgtggctgttccgaggggactttgtgatggactaccccaggccgatcatgcccaacatggtcttcattgggggcatcaactgtgccaacgggaagccactatctcaggtctgtattggtgccttcatccaatcaatgttccaggcaaaacactttttaaaaaatgtatttacttacaagtgcttccatatctacttatctttccaaagattttattttggcttctttataacagataaactgttgaggggcctagtgtatttcaagttttcagtggtcactgagagga

SEQ ID NO: 97445 - DNA, 12405 bp, Homo sapiens
tggtgttatcgggttattttgcccgttaattgatgcagtttcttcacagcatcgatagtctttacaatttggcatgtttttgcagtggctggtactggtgtttctttccatgtttagtgcttcctttaggagctcttgtaaggcaggcctggtggtgacaaaatctctcagcatttgcttgtctataaaggattttatttctccttcacttatgaagcttactttggctgcatatgaatttctgggttgaaaattcttttctttaagaatgttgaatattggcccccactctcttctgtcttgtagggtttctgcagagagatctgctgttagtctgatgggcttccctttgtgggtaacccgacctttctctgtggctgcccttaacattttttccttcatttcaactttggtgaatctgacaattatgtgtcttggagttgttcttctcgaggagtatctttgtggtgttctctgtatttcctgaatttgaatgttggcctgccttgctaggtttgggaagttctcctggataatatcctgaagagtgttttccaacttgtttccattctccgcatcactttcaggtacaccagtcaaacgtagatttggtctttccacatagtcccatatttcttcaaggctttccttgtttctttttactcttttttctctaaccttgtcttctcactttatttcattaatttgatcttcagtcactgataccctttcttccagttgctctaatcagctattgaattttgtgcatgtgttatgaagttcttgtgccatggttttcagctccatcaggtcatttaaggtcttctctacagtgtttattctagttaggcattcatctaaccttttttcaaggttcaaccttccttgcaataggttcgaacatgcacttttagcttggagaggtttgttactaccaaacttctgaagcctacttctgtcaactcgtcaaagtcattctctttccagctttgctccattgctagcaaggagctgtgatcctttggaggagatgtgcttatgcgctatggtttttagaattttcagcttttctgctctagtttccccccatctttgtggttttatgtaccttaggtctttgatgttggtgacctacagatggggttttggtgtagatgtcctttttgttgatgtttatgctgttcctttctgtttgttagttttccttctaacagtcagatccctcagctgcaggtctgttggagtttgctggaggtccactccagatgctctttgctttggtatcaccagtggaggctgcagaacagcaaatattgcagaacagcaaatattgctgcctgatccttcctctggaagcttcataccagaggcgcacccacctatatgaggtgtctgttggcccctactgggaggtgtttcccagtcaagatacacagaggtcagggacccgcttgaggaggcagtctgtccattctcagagctcaaatgccatactaggagaacgagtgctctcttcagagctgtcagacagggatgtttaagtctgctgttccccacatgttcagaagttgtctgctgccttttgttcagatatgccctgcccacagaggtggagtctatagcggcagtagcccttgctgagctgcggtggactctgttcagttccagcttcctggatgctttgtttacctactcaagcctcagcaatggcggacacccctcacccagccaggctgccgcctcacagttcaatctcagactgctgcactagcagtgagcaaggctccgtgggcatgggagctgctaagccaggcaggggagagaatctccttgtctgccagtttataagaccttgggaaaagcacagtatttgggtgggagtgtcccgtttttccaggtacagtctgtcatggctccccttgtctaggaaagggaaatccctcaccctcttgcacttcctaggtgaggcgacgccctgccctgcttcggcttgccctcagtgggatgcacccactatccaaccagtcccaatgagatgaaccaggtacctcagttggaaatgcagaaatcatccatcttctgcgtcgatcatgctgggagctgcagatcggagctgttcctatttggccattggtgctgaagcttccgttctcctctccaacacctcctttttttttccttttctcttccagtttttcaatgtgaacatattctctagagttaactacattggctcaaatcttcactatcatctcagtggagcagaacaaattgggaactgtggcacaggtcactcttgctatgccccttaagaattccacattaacaaagctaattttcgagtgtggtaaagaacaggctagtgtatttagtagtgagtccattgactgtttcccaacatgaggtcacactagatttaatatggtttggctctgtgtcccccaccaaatctcatcttgaattgtaatccccataatccccacgtgttgaggacaggacatggtgggaggtccccacctcctaatctcatcatagtgagtgagttcttatgagatctgatggttttataaggggcccttatcccttcacttgcaagctattcctctttctctctttcatgtaagacgtgtctttgcctctctctcactttctgccaggattataagtttcctgaggcccctccagccacatggaactggagtcaattaaagctctttcctttataaattacccagtcttgggtatgtctttatagcagtgtgtgaatggactaatacagtaaattggtgtcatggagagtggggtactgctataaaactacttgaaaatgtggaagtgacttggaactgggtaacaggcagaggctggaacagtttggagagctcagaagacaggaagatgtgggaaagtttggaacttcctggagacttgttgaacggttttgaccaaaatgctgataatgttgtggacaatgaagtccaggctgagtctcagatagagatgaggaatctgttgagaactggagcaaaggtcactcttgctaagctttagcaaagaaactcgtggcatttttgcccctgccctagagctctttggaactacgaacttgagagagatgatctgaaattggaacttatgtttaaaagggaagcagagcataaaagtttggaaaatttgcagcctgaccatgtggtagaaaagaaaaacccattttatggggagaaattcaagccagatgcagaaatactagctaaagaaatttgaataaataaggaggaaccaaatgttaatcaccaagacaatggggaaaatggctccagggcatgtcagagacctttgcagcagaccctcccatcacaggcctggaggcctaggaaggaaaaatggtgttttaggctgggtccaggcccccactgctgtgtgcagcctcaggacttggtgccctgtgtcccagtggctccagccatggctaaaaggggccaaggtagagctcaggccattgcttcagagggtgcaaacctcaagccttggcagcatcgatgtggtgttgggcctgcgggtacacagaagataagaatttaggtttgggaacctccacataaattttagaggatgtaaggaaatgcttggatgtccaggcagacgtttgctgcatggatagagtccttatagagaacctctgctagagaagggtggtaaagaaatgtgaggttggagcccccacacagagtctccactggggcactgcctagtggagttgtgagaagaaggccacagtccttcagaacccagaagggcagatccaatagcttgcactgtgtgcctggaagagccacagacatcaatgccaccctctgaaagcagccaggacgagggctttaccctgcaaagccacagggttggagctgcctgagaccgtgggagcccatttctggcatcaccttgatctagatgtgagacatgaagtcaagggagattattttggagctttaagatttaatgactgccctgcctggttttggacttgcatggggcctatagcccctttgttttggccagtttctcccatttgaaatgggaacatttacccaatttctgtacccccattgtgtcttggaagttactaacttgtttttgattttacaggctcatgggggaagggacttgacttgtctcagatgagaccttggactatggacttttgagctagtgctgaaatgagttaagactttggaggacagttgggaaggcatgattggtttttaaatgtgaaaagacatgagatttgggatgggccagagggcagaatgatatgatttgactgtgtgtttccacccaaatctcatctcatattgtaatttccataatccccatgtgttaaggttggtacctggtgggagctgattgaatcatatcggcagttttccccatgctgttcttgtcatactaagtgagttctcatgagagctgatggttttataagggactctttctcctttactcacaagcttttcctctctgtctctcgcctgctgccatgtgagacatgcctttgcttatctctcaccttctgtcatgattgtaagtttcctgaggcctccccagtcatgtggaactgtgagtcaattaaacctctttcttttataaattacccagtctcagctgcgtctttatagcaggctgagaatagactaatacaagattggtggtgattgaagttatactgaaagggtttaaaggagagtctgagaaaaggaaatgaatctgcatttattgagaaagttgatgagaaagtggaattagaaattcctagaaaggtaagttgttgtgtgaattatttcccaaaatggggaagtctctctacctgtttggagacagaaagtggaatcagaggagaagaagatgatggacagaaaggatcattccctcttccagatgctttccagtgtgtgatgtaagctgaactaaaatcagctgtgttgaactccagccagaaaaaatgtccggcattttgttttttgggaccctaatgaaatggttacaggtctccaggtctcttggggctcacagggtcatgcctttccttgcccagtgtacttggtgagaaggtacaggtgtttccatggagggtgttcattttagggatttcaagagggtcatctttgcaccacaggaaatgcccccttttacactctgaaaaccttatcaaaccgttgtataaaagatgaatacccacataacaggctctagcactgttctgtttttgagctgagacattttaaaaggagatttttcaattctaaaaattctttaaataaaatgctcttgcagggacaacatagtaggtcaacattgttcccatctccacaaaaagttttttttttaattagctaggtgtggtagcatttctgtagtcctagctactgggaatgctgaggaggaaggatcacttgagcccaggaattcgtggttacagtaagctatgatcttgcctaggtaacagctacagagcgagaccctgtctttaaaacaaacaagcaaacagacaatcaagctttacacttctataaaagcaacactttccatttatgacagcactaatccaggatatatcaaaactgaacttgtgtttgctttcaactgttaaaactagccagagttgttacagacccactacctctgagtgacactggtatgccactctttgctgaccactgaacaatgggatttatgtacccaattgtgtagatacacaccaactcattctactctacccagagtagtgatttccaacacacaaaaccacaatgaaactgcccatgcctttctaccactttgaaactcctttcatccctgaactgctccaaaagcaaacctactcagcaaactactcagtgagtatcttcacacatgtaagttccctcgtctgatgtacaaaaaactgaactcatttttcaaaagccttaacagtctgtcttattctgatacttcttttatggttattgtatgagaatcaactacccaggcacctcggagyatgttgatttcagagttcagtgtcagaccccatgagcccctgtgggatggtgccagctgactgccatgttcctgctgtttattgcttgggtgccattacatgcagagtggactctgagggttctagagcatatccaaacccatatcacactctttgttggttaatgatgtgttcaggccatgatttttctgtaaaaaattaccagcatgctgctcttaatttttttcagcctatccagttcagttgccttttgctctcatgccttatgcaaacctttcctcagaggtgaccctagaagaagggaccctttgtgatggaaaaggtcytcatttggggcataacctgtgccaacagaaaggtactttcttgttgtgtttatggtgcctcacccaaaaaatattacagatacacttggctttcatcaacctaatttgatatgtcccaagcatagcaataggatagttctgtgtggccttatggagatcctttttttacatttccaggacccactgccaagaccagcttggtcgtggagaccctaacccagcagcgctagacgaattaaagacacacacacagaaatatagagtgtggagtgggaaatcaggggactcacagccttcagggctgagagccccaaacagagatttacccacatatttattgacagcaagcctgtgataagcatcatttctatagattatagattaactaaaagtattccttacgggaaacaaagggatgggctctggctaattatctgcagcagaaacatgtccttaaggcacagatggctcatgttattatttgtagtttaggaacaccttaagcggttttcctccctgggtgggccaggtgttccttgcccttattccagtaaactcacaaccttcagcataggcatcatggctatcatgaacacgtcacagtgctgcagagattttgtttatggccagtttaggggccagcttctggccggaattgggggcttatccccagcaacctaccatagttggagaaccacgttcaggctgaagacagtcctagtataccaccgaccaaccatgtaaccccaaggtttgtcctcagccttcagagggaacatgcttccaccgatttcagctcagtgatatgggattcaaatgtctgacctccaaaatattaagataataaatgcatgttgttttgaaccatcattaaattaagccagaagtattgatattatttgtagatttcaccactacacactaaacaataaagtcaaatgatttagagcaaaccacctggctcacactttcccaacggaaaaaggtaatgctcaaagtgctgaactgaacattctgtcctaccactagcaaataatcattgtctgcctcaggcttaagtttaataaatagcaaattgcatacagatattttacaacgattgaaagacaaacagaggtcctatccgtgtagtcccaacgataagaacaggtgttggcatgaagtgtttataaattcttgggtacagctgttctgaaagtaaagttcactttcaatcctaaaaaaagtccgctattcctccagatgtgcttaaagtcaaatgtggactggaattacttggtgtcaatgcggagtaactgctctttgctatttattatgaaggactttaactcaactctccatcttcctccacttccaccctttcttggccattctcaatgattctcttggtggtgatttttttaccatcaactatttcagtggaagtcgacatggacttgaagctgcctgtcccatcactaccgtaggacatgcagaaggaagaaaggcccccacttcccagggagccaaaggaacgaaatcctgtatcaaaagaagaaaaaacacccccaaaagctggaaattcactgaaggcagagaaaaggggtgcagacgctctgcttctgcttccccagcagttcctctgacccccccaaaatattctccagcgggtttcccaagaggtcaaaggagaatgggtcctggccgccgaagaactccctgaagacgtcggctgggtcgcggaagctgaagacgtactcgaaggggtcctcgaagggcctgccgcctgtgcagccgccctccgcccccgcctcgccatagcggtcatagatatcgcgtttcttggcgtccgacaacacctcgtaggcctcggccacctgcttgaatctcctctccgcttcctccttgttctcagggtttttgtcggggtgccacttgagcgccagcttgcggtacgccttcttgatggcctcggatgaggcctgccggggcacgtccagcacctcgtagtagtccaccatgctggatggccagaacggcccaccaggcactggcacagcgagcggcaaggctgccagcacccaggcgcaggcccgagtgctcggagacctgggccgcctggagagacgccccttatgacgcagccacatctcattggtcgaggcctatgagcgcctcgcatcccaagatgcagtgcttctgggactggccctgctctctgtgaggctctgtgaggccctgtgatgctccaagaccaggccccgcccactccggcctccaaccagccatggtctccaaaaaggatgggaaaaagaggttggggaaaagagagggccttgactttggctgcctgaagaactgtttttcttaaagtaggctttatatcagtctttttcctcggccacaggagggaagagggtggtgggagtgagtttagtctgactggggctgaagacatcctgttgtttaggactgcagttctccaacgttccagccccggtgcccatttgcttttgttcatgtggattatatctatcatacgtactgcattagagattaaaacagaattaaaaagacatattaattgggcaatttagtaagaataaacccatgacacaatagcaaatcttatttttatgtaaattttattaagacaaaatgtagtgagaagagtggcatcgttttacagtttttgcatctctctttagtacttggctctatagagaggtggattctcatgtcagcttctgtattcaatctactgtgatattacacatcacccatgtagcttctggaaaactccactgtacacttgtgagagaatgacggtgaaaaaatcaagtagcattattatggaaatagttttaactttgcaaaattctcctgaaaaattcttggggatccctaggatttcctggctcatactttgagaatcgctagtctagcagagtagtccttggtattctgaagggattagtttaggacaaccctcctctccataccaaaatctagatgctcaagctccttttataaaatgacacagtatttgtatataacctaccaatatccttctttaagcctctagtcatctcttgattacttttacctaataaatgtaaatgctatgtaaatagttgttttacagtattggttttttatttgtattatttgtattgttttttcattgctcttccccccaaatatttttaatctgctgttggctgaatctgcagatgtgaagcccaagtatatggagggtcaaatgtgcatgttattcacttttcttgactgctaaaacaaccagggagatcctctcagacaaaaggaaatacagcactatttactgtatcgaaaccattaagacttgcaggccgtgtgtatagcactggggataaacgtgggatgcagtgattatttccactagaactgctatatcatgaccatgaattttgggggaatttttttgagatctgagttctcttcacctccttattctctttttgacactggattcttttctttgataaattgtgaggcaatacactagtaaaggtcactcagttctaaggggaaaatgattaaccaaagaacattctaagatttcctatagggtattaggtctaatggggatgtgttatgtcaccagaacaaacttctaagtttatatagcctctagtgacataacctgagacccggacttggcacttggtaagcacacaatgaacagtcatagaaagctggccgagggtagagttcagtgtgaacaaagcaatttgggaacatcaaagcaagtttggagaacaacaagtgatccagaatggctggagggtaagaggcagagggagggggcaagcagaaggggtggagaggaggaatgagcttagacaggggggctggggtctatcccagagttttgagagcaaggcagaggactctgaattttcttctgtgcccaggaagctgctgaccaaggttccagaagtgttggtggggtggcgtttttcagggagcagctgaggcagtgattcagaagggacagctgggggttgggcaactgggggacaggggccctgaaatgggaccatgacagctgggtctgagagacagtggtagaaacatccagattcagcacttacttgctggcttggatgcagggtctagaacgaaaagagaagaggagtcacttctatacagaaacatgtccagagtgcttactgtctgcaaaactgtggactggcacctgagtgatagcatgattccaaagccaaaatcttgcctgtaaggaatatatgtataggatatagctatactctaatagcaaggacagatatgcaaactgctaaaagatacaaggcagaacagaacaaaacgctgtggggattcaaggaaggtggctttgtttcccttggagggccctgtagatgatctacagggcaatggacatgtttatgttgctcctttagtaacaagtcccttcattctgatttgatgaaaggagctgggagtgtgtccaatggtgacctattaacttatgtcttcagcttaaaaagaaagtaccttcaaaagggttccagaaacactttccatggacatgtcactctttagtagcccccaaagcaagaccatcatattgctgccctgctgtgtgacttcttagcccctagagcaccacaccctgtaattgcctagttgtgagtttgtctctgttcacctgacccctcctttcaggcaaggaccatttctaacttggctttctgtcccgagttcctagcatagtaggtagggctcacacattccataaatatttggtggataagggaattagcaatggattctgctttggttccaaagcagagattaattggattgcttagtagtggttttctgttgtaattcatgagcgtgaatgtggattgcctactattgcctaccactgttggggacctctcagacctcagctgcagcctgataaacgtggttaacagagaagtaggaggctgtgacatgaaatgggtttccacaggcctttgttgggaattggatgagaaacaagagcttgaacttggatgttccccagagcgagcgcagggtcagatgagtttttcaagtaggagtgatcggtctttcccgaagtgggacccataatgaaagacaatgattggttaatcggtaataattaactaggaggagagcactctatcttccaattacatgatgatttgctaagtggctcagtgacaaggtaattaagatgaagaaaacaaatgtaggaggcacagcgtggggtggacagtcagctgtccgtgtcttctgctgagatggccacaggaccccaggttcccctgctgtggctggccacaggagtgctactccttctcagtgcccagccctgggctgagagtgggaaggtgctggtggtacccattgatggcagccactggctcgcatgcgggaggccgtgcgggagctccatgccagaggccaccaggcggtggtcctcaccccagaggtgaatatgcacatcaaacaagagaaatttttcaccctgacaacctatgccatttcatggacccaggatgaatttgatcgccttgtgctgggccacactcaactgtactttgaaacagaacattttctgaagacattttctaaaagtatggcaattttgaaaaattcatctttggtctttcataggtcttgtgtggagctactgcataatgaggccctgatcaggcacctgaatgctacttccttcgatgtggttttaatagacccaatttacctctgtggggcagtgctggctaagtacctatcaattcctgctgtgttttttttgaggaacattccatgtgatttagactttaagggcacacagtgtccaaatccttcctcctatattcctaagttactaacgaccaattcagaccacatgacattcctgcaaagggtcaagaacatgctctaccctctggccctgtcctacctttgccatgctctttctgctccttatgcaagccttgcctctgagctttttcagagggaggtgtcagtggtggatcttct

SEQ ID NO: 97446 - DNA, 13311 bp, Homo sapiens
cctcaacttttgtcttggaaagtctttatttctccttcctgtttgaaggatattttcaccagatatactattctggggtaaaaggtttttttttcttcagcactttaaatatgtcatgccactctctcctggcctgtaagggttccactgaaaaggctgctgccagatgtattggaactccattgtttgttatttatctcttctcttgctgcttttagaatcttttctttatccttgacctttgggagtttgattattaaatgccttgaggtagttttctttgggttaaatgtgcttggtgttctctagccttctcatacttgaatataggtatctttctctaggtttggaaagttttctgttattatccctttgaataaactttctactcctatctctttctctacctccactttatgggcaataactattagatttgcccctttgaggctattttctagatcctataagcatgcttcattgttgtttattcttttttcttttgtctcctctgaccatgtattttcaaatggcctgtcttcaagctcagtaattatttcttgtgtttggtccattctgctattaaaggactttgatgcattcttcattatgccgattgcatttttcagctccagaatttctgcttgattctttctaatgatttcaatctctttgttaaatttatatgctggaattctgaattcctcctctgtgttatttggaatttctttgagtttcctcaacacagctattttgaattctctgtctgaaaggtcgcttatatctgtttctccagcgttagtccctggcaccttatttaattcatttgatgaggtcatggttttcctgaatggcgttgatgctagcagacattcttcagtgtctgggcattgaagagttaggtgtttattgtagtcttcattgtctgggcttatttgtagccgtccttcttggaaaggctttccagatatttgaaaggacttaggtgttgtaatctaagctgtttctgctttagggggcaccccaagcctagtaacgctgtggttcttgcagacttgtagatgtattgccttgatggtcttggacaagatccaagatacttctctggattccagcacatactcttgctttcttcccttacttcctcccaaaaatacagagtctctctctctctctcactctctctctctctctctgtctctctctctgttctgagccacctcaagctgggggtggagtgacacaagcatccttgtggccatcaccactatgactgtgctggatcagacctgaaaccagcacagctctgggtctcacccaaggcctgctgtaaccacctcctggctactgcctatgtttgctcaacgcccttgggctttacaatcagcaggtgatacagccagccagacctgcatccctcccttcagaatggcaaggtcccccaggccctgggtgggtccagaagtgccatctaggagtcagggactagagtcaaaaaccttagcattccacctggtattttattgtattgcagctgagctggcactcaaaccacaagatgcagtccttcccattcttccctcttatttgcaaagacagaggagcctcaccttgtagccactgccacccctggccatggacagtactgccagacttctgctggtgttcccttaaggcccaaggtcttaagtcaacttgtggtgaatgctgcctggcctgagacttgcccttcaaggcagtgggctcccctctatcccaggggagctccagaaatgctgtccgagtcaagtcctggaatcagggaccccaaaagccctcttgatgctctatccccctgcagcagtgttggtacctaagttataaggcaaagtcccctttacctttccttgtgctttcctcaagcagaatgagttttgctccatagccatcacagctgagaatgtgctgaatctcacctagagccagtaagtctcagaggctcaccaaggcccttgacgtagtacgaggtttcactgctggtattcaggttccaaggtctcttcagttagcaggcgatgaacgctggcaggactgggccctttcttttaaggcagcaggttcccttctagcccagggtgtgttcagaaatgtcatctggaagctagggcctggcacaggggcctcatgattctgaccagtgccctatcctgctgtggctgagctggtctcctaaatgcaagacaaagtcctccccacttttccctctcctctcctcaagtagaaggaaagggtctcttttggagccgcaagctgtgcatcctgggattaggggaggagtgatgtcggtactcccttggctgcttcagctagtgtttcagtatgtcatactcccctttacccagttcactgtctctgggcctagtacagccctagaactcacctaagagttgcaatctttatggactagactgcctttcaagtttacttgaggccaagaccattttggccctcggtggtgaggtctgtgggcattcaagttcagacctctgagatcagcaatttccctcagcctagggctggtttaaatgctccctcaatgctgggcacggtggctcatgcctgtaatcccagcacttagggaggctgaggtgggtggatcacttgaggccaggagtttgagaccagcctggccaacatggcgaaacccaatctgtactgaaaatacaaaaattagccaggtgtggtggtgcatgccggtaatcccagctactcaggaagcagagattcgcttgaacctcggaggcagaggctgcagtgagccaagatcataccactgcactccagcctagatgacagagtgagactccatctcaaaaaataagaataaataaataaataaataaataaacgctctctcagtgggtgggtgtcagctgagtttggtctgggtttcctttctgctctaacagaatagcactgatttcagtgcctcccaattgtctcccaccagggctcagggattctctttatgccacaccgccactgtgggttcagggggttgggtgacataggagatgcagaacttttttttttctatttcttcagtgtctctgagttatataaaatgaaaaccaggtactatgagtgctcacctgagttttggttcttatgaaggtggtttttcctgtgtagatagttgctaacttggtgtcttctctgtccagattcttttccagtattgacaatcctttacatagaaaactgtgtgtaatgagttctaaaggttcttatgacccctgattgagaagctgaattagagatattgggtttgggagcaggtagaccactttgacacctttagggttctgggtggctagggacattgtccaatatcaaaagaactttaaaaaacaatcccttactggcaatgcattttctgccttcagggacaaagcatcgatgaaagcaatccagaaaaattgttcttgttgactaggcttcttgagagacttattcactatcaagagaacagcatgggaaagacctgcccccatgattcaattttcccaccaggatcctcccacaacagtgggaattgtgggagttacaattcaagatgagatttaggtggggacacagccaaaccatatgattccaccctggtccctcccaaatctcatgtcctcacatttcaaaaccaatcatgccctcccaacagtcccgcaaagtctcagcattaactcaaaagtccacagttcaacgtctcatctgagacaaggcaagtcccttccacctatgggcctgtaaaatcaaaagcaagttagttacttcctagacacaatgagggtacaggtattgggtaaatacaccattccaactgggaaaaattggccaataagggggctacaggccccatgcatgtcagaaatccggcagggcagtcaaatcttaaagctccaaaatgatctcctttgactccatgtctcacatccaggtcttgctgatgtaagaggtgagttcccatggtcttaggcagctccacccctgtggctttgcagggtacagcctcccttccagctgctttcacagagtggcattgagtgtctgtggcttttccaggtgcacagtgcaaactattggtggacctaccattctgaggtggagggatggtggccctcttctcacagttccactaggcagtcccccagttgttgctctgtttgggggcttcaaccccaaatttcccttctgcactgttctagcagaggttctctgtgagggtcctgcccctgcagcaaacttctttctggacatccaggcatatccatacagcctctgaaatctaggcagaggttcccaaacctcaattcttgacttctgtgcacccacagtctcaaccccacatggaagctgccaaggctcggcacttgcaccttctgaagccatggtgtgagctgtactttggctccttttggacacagctggagcagttgggatgcaagacaccaagtccctaggctgcacacagcagggggccctgggcctgtcacacaaaaccattgtttcctcctaggcctccaggcctgtgatgggagggactgctgtgaagacctctgacatgccctggagacattttccccatggttttggggattaacattcggctcctcattacttatggaaatttctgcagccggcttaaatttctcctcagaaaatgggattttcttttctatcacattttcaggctgcaaattttccaaacctttatgctctgtttcccttttaaaactgaatgcctttaacagcacccaaatcacctcttgaatgctttgctttttaaaaatttctcacaccagttaccctaaatcatctttctaaggttcaaagttccacaaatcactaggtcaggggcaaaatgctgccagtctctttgctaaaacataacaagagtcacctttcctccagttcccaacgagttcctcatctccatttgaaaccacctcagtctggactttattgtccatattgctatcagcattttgggcaaagctattcaacaaatctctagggagttccaaactttcctacattttcctgtcttcttctgagccctccaaactttgccaacctctgcctgttacccagttctaaagtcccttccacgttttcaggtatcttttcagtagcaatccactctactggtaccaattgactgtattagtctgttttcatgctgctgataaagacatgcctgagactaaggaatttacaaaagacagaggtttaattgacttagagttccacatggctggggaggcctcacaatcatggcaaaagtcaagaaggagaaagtcacatcctccatggatggcagcaggcaaagaaagagagcttgtgcaggaaaacttccatttttaaaaccaccagatctcgtgagacttacttactactatgagaacatcacgggaaacacccagccccatgattcaattatctccctccaggttccttccatgacacgtggaaattgtgggagttccaattcaagatgagctttgggtggggacacagccaaaccatatcattattgaatttgatttgctgaaatattgttttacattttcgtatctaaggtcatgaggatctgtagtttttgtatcttgtcacatctttatctggttttggtattgtggtaatgttggtctcacagaatgaattagggcatttcacatccttctgttttccggactagattgtgagaaattggtattatttcttccttcagtgtttggtagaatttatcagtgaagtcatcagaactttaccgttttgtttgtgggaacatttgaagtcaaaattcaatttgaatttaaaaggtacagattatgtcatttgtgttattaatttcttcttgtgtaaagtctgacagcttgtgtcttttaagaaatttgtccattccatctaagttgtagattttattggcatgaacttgttcatgtttcttattgttttaatacctgtagaatttatggtgatactactgctctcattcctgatattggtaatttatatcttctgtcttttttcctaatcagtctgggtagagatttatcaagttaattgatttgccccaaaagctagctttggtgtcattggttttctccattgtttttctatttcctatttcattgatttctacactgaagttagcctccagggaaggtagatcactcactgcccatggatgggagccactggttcaccatgtggtcggtggtggagaaactcattctcagggggcatgaggtggttgtagtcaggccagaggtgagttggcaactgggaagatcactgaattgcacagtgaagacttcttcaaccttatacaccctggaggatctggamcaggagttcatggcttttgccaatgctcaatgggaagcagaagtacgacgcttattttctctattaatgagttcatccaaatgtttagaatttaatttttcacattgcaggagtttgtttaatgactgaaaattagtagaatacttaaargagagttcttttgatgcggtgtttctggatcctttagatatgtgtggcttaattgttgccaaatatttctccctcctctcggtggtcttcgccagaggaatactttgacattaccttgaagaaggtgcacagtgccctgcttctctttcctacagtcctagatatgtctcagggttttcggatgctgtgactttttattattattattatttttatttatttatttatttttgagacggagtcttgctctgtcacccaggctggagtgcagtggcgtgatctcggctcactgcaaactgcacctcccgggttcacgccattcctctgcctcagcctcccaagtagctgggactacaggtgcctgccaccacgcctggctaatttttttttgtatttttagtggagacggggtttcaccgtgttagccaggatggtctcgatctcctaacctcgtgatccgcccgccttggcctcccaaagtgctggaattacaggggtgagccaccacacccagcctggaygccatgacttttaaggagagagtaaggaaccacatcttctacttagaggagcatttattttgcccatattttttcaaaaatgccttaaacatagcctctgaaattctccaaacacctgtcatggcatatgatctctacagccacacatcaatttggttgctgcgaatggactttgttttggagtatcccaaacctgtgatgcccaatatgatcttcattggtggtatcaactgcaatcagggaaagccagtgcctatggtaagtcattgctcctttagcacattaaaagtattctggatttgaatatttaaaaagattccttacggaactgggatttgacatttgtgtttgttgcatctaaaatttcttttctgtgtaaaaaattattttgtgccatccacgtgtttgttggttagcaacttttatataatggcctcgttaatatgtatgtgtatacgattggttaattgctcataatttccactgcatttttaaaattttgaaacagagtattgctatggtgccctggctagactcaaactcctgggctcaagtgatcctcctatctaagccttccaagcaattatgacttttttagtatttttggaaaagtatttaaaagcacaataagaaatgaaaatttcatttttaactaacctgtactacctgctgcagtaaaatgttctttgcagttttgtatgcatgtgtttccatctgttgaaattatatataagcatatatgtaaatatttatacttattttatgaaaatcaaatcaactatcaggctggacatgttgttctttactatgcgtttttacttgccagtaaaccagagacatcttcacagatttgacatgttcttttaataattgcataaaagtctttactttggatgcaacatagacacaagctttcccaggtgtttttctgctaaagatttggctaacttcttcaaaacaacaatgataagcagatgttatctttctttgaccctgaagaaagtataaagcagaatgcccttagccacccaaaaaactgttaccatgatgtttggtcttgtccagtctgcttttgatttgactggatcactttcatctcttggtagccattgctttgcttgtgctttgtcttcattatcatactggtaaatctatgtttcatcttctgttacaatctttgaagagatacttcaaggttttttgtttgtttgtttgttttgagacagagtttcactcttgttgtcgaggctggggtgcaatggtgcgatcttggctcaccacaacctctgcctcctgggttcaagcgattcacctgcctcagcctcctgagtagctgggattataggcacatgccaccacacccagctaattttgtaattttagtagaagcagggtttctccatgttggtcaggctggtctcgaactcctgacctcaggtgatctgcctgcctcggcctcccaaagtgctgggattacaggtgtgagccaccgtacctggccaaggtctggatcccacttgtttataatttccattgaagggtttgttcttgtctgcagctgatctggctgcaatgattttggcacccaacaagtagaaaatttgttcaactgaaatttttgtcagaattgtgtaaactgtcctgactgagatatctattgtgttggctattgtttctgctgttaattgtcagtcttcttcagttagagcatgagcaagatgaattgtttccttgcaaattggtatggatggtctgctggtgtaggctttatttgcaaccttgtcctgtcccttcttaaaaggaattactcatttgtaaactgcaaatttcttttgaccatttttcccattaacttttttttaaagcatcagtgatttcaccattcttccactcatatctcagcataaattttatgctattgcttcaattgctgcagaattcatgttgttttgatgggggcttttttccaactgatgtcctatccttcttagtgcctcaaactagatcctattcagacatgttttaacaagttagtaaaagtttgtttggcacaaagaaatttgaaatccatgcttaagtttttcataatatgaattttcatgaattgtttgatgatccctcatctattacttttttagcaatggaccatgcaattttggctatgttctggcttcttacaaggttcagtagactttgtaacacagttgtatgtctcacacatcggcagctgtttggtaaaggattgacttttagccaactcatgggaaaatgaaataatgtaaaaaacaggaagactacagttttagacctttcaagtgaggcatggctttcagctcttggcaagaacaggcgaggagatgcaagcctctacaaggctagacttttcaaagtgcttctctcccctttaccctccttcagttacagcaccaagcaccacccaggtattacctgcagcctcaccctctacccagttgtgggatcctgccacttcctgaacccacactgagttccttgtggctcacagggtcacccagagggcttccgagatacggaaagctatgtgtgattttatatcacctatcatgttaagatatgtataaaataggaaacatattggccatatatcattttatatatttttggttttacatgtctaaaaaatacatgtttttttgtatgtattaaaggataggtatgtataagaggttttatagaagtggaaagttatattttttgcatatctttatgaattataataaaggaaggaaaattctcaaagaggaattcagatatcaaagagtgccctttgacaaagagccttggttacaacatacctacaaaagtgaactgtcattgaaagacctatggacactggatttctctttccttatttagaagggcaggctgtgtcttggaaaagcatacagtttgttgtatcttgctggacaacaggagtcatagtctgaagtgtctgatgagaaggaagcatcacttgatggagtgtgcatctgtgcctgtgtgtgtccacgcgtgtttgtgtgtgtgcatgcacacatgtgtcagcatgcagtgtctcagatcctacataggggtttttcctgaaggtctccagtagcaaaaactcattgagtctatccaggggaattacatccaatgctgtaattaaatactttaacaaagatagcagatcatcattcaagagaacatcaagatagttttaattaagaaaaaaaaaaggaatcactgccaggcttttttagtttttggtgagttccagcagaattgatgactaggtccagtaggaaggaattcaggattactctttaccatccagggtgagtgtagctctggagaactggggatgggaggtgactgcacagcaagaaaagatctgggcttcccccattgctctaagatctggttccattgtgagattcaaattaagagtaagctgttaatgggcaagtccaaggcctctcaccaggattatttatttcaacttttttttgtcaaagttttcaaatgtatagcaaggagagactacagtgtaatgagcacccatatatccatctttgtgttacataattttcaatattttattatactgattcatgtatctgctcttttgttctttttttaaaaataaattttggctataattttttaatggaaatgctggagatatcattctatccccaaatacttcactaaatgtaagaaataaggaaaaaaggaaaatttgttacatagccacaatatcattatcattcctcacaaaatcaataactctttaatattgtctcactcataatgcataatgaaatttcccctaattgtctcaaaaatgtcttgtacatgcagatcagtagaacggagttgagaatccagatataaacccatacatccttggccaattgatttttactgtggtgccaagactgttcaaatgggaaagaataatctcttcaacagaggtcgctgagacagctgcatatccacatgcaaaagaatgaagatgcacccttatatgcaaaaactaacttgaaatggatcaaatagctaaatagaaaagctagaagtgtaaaagtttagaaggaaacatttggggaagtatttatgacccagatttggaaatggtttctgtgatgtgacacacacattgttgtgtatgagaaacaacaacaacaaaaaacacagacatcaaaataaaacacttttgtgtgtcaaggacactatcgagagagtgaaaagtgaacccacatggcctctctaagatgtgcaagtaaacatgtacgtgcctgacatggaggctcctgggaggcaaccacagtcccaaaagacctgaaatttcaaaatcctgaatgttaagagcctgagagatcaacgtcctacaaatgtaattccagaaaaaataactttaaaaattatttatttgaaagataatctgtttacgttttaaaaggggatttatttgaaaaacatataaaaacacgacagaccacttcataggccactttacaccataaaataggtaataacaacatacaggtatctttgcaagcgtaaaccctcaggtgtactaatgaccttcatataggtgtatcaattgtgagaagatgaatcatattcttaaagtaataggttaaaaaaggaaaagtatcaatatttattactgtggttggtaatcttgtgcactcaggtttgcagctttgatcatctgaaataccatgaaaaatgacctgagacttatcatgaggtcagtcagaaacctctatgggtcaccaccgcatacacagttgcttaaagtgcccaagtcttgagaaattttgttttgttttgtttttttgagacagagtctcgctgtgttgcctatgctggagtgcagtggtgcgatctcagcttactgcaacatctgctgcccgagttcaagcgattctcctgcctcagcctcctgggtagctggaattacagatgcccaccaccacagtcagcaaatttttgtatttttagtagacatggggttttgccatgttggccaggttggtcttgaactcctgacttcagatgatctgccctcctcagcctcccaaagtcctgggattacaggcatgggccaccacgcccggccaagaaatgttatctttcacagatgcagatgtacaaaagggacatctcttcattattgaggacatttcaacatttgtacgtacatgcctaatgcttacacacttactcttgtgctaatgcacttccatggagtcaaatttgtgagcataaaatgaattagaattctccataagtctatacacagtctctgccttcagtattggaaatgatatgaagatgaaatacatagcatagcaaattgtaaaaataatgctgacaatttaaccttgtgaaaaaacctaaaaagaagaaaaagtaaaagaaaaaaaggaaaaaaacctccaaattaacctattctgtgattgtgatttttgggattttagctgttagagagtttagatttcagggagttagaccttagggatttggatccttagggaatcaatatttcagaattcaaccttcaggattatgtgttttggggttatgtctttcaggattgtgatccaaaccctatagcatcttgtttcttagcataacctgtactaatcgtagatatatctctgtactccagcagagcatcataaaattaagtagtttacagcagagagtctcaacctatcagtgattaaggaatagaaaaaaacgttttctgcagttgattatatattcataattgtttgtaatatataacaaaaatgaaaagctagaaagtgaaatgaaataaaccacagccctataaaatgcaaaactactgatgattgcttggcgacatagcaacaccaattgctacaggaatttctaagcatttcctgcagggtctgcacccatgctgaggtggttaggtaacacaacgagctgcaaaccacatcttgaacagactgttttagacccagtccagtggctctatgtgagtagtgtttaatcagaaataaggcccagcacagtggctcacgcctgtaatccctgcacttagggaaactgaggtgggcggatcacctgaggtcaggagttcgagatcagtctggccaacatggcaaaaccccgtctctactaaaaatacaaaaattagcacagtgtatggcgggcatctgtaatcatagctactcgagtctgaggcagaagaatcacttgaacctggaagatg

SEQ ID NO: 97447 - DNA, 18580 bp, Homo sapiens
  misc_feature (1)...(18580): n = A,T,C or G
gagaccatcctggctaacacggtgaaacctcgtctctactaaaaatacaaaaaattagccaggcgtggtggcgggcgcctgtagtcccagctactcgggaggctgaggcaggagaatggcatgaacccggggggcagagcttgcagtgagctgagatcgcaccactgcactccagcctgggcgacagagcgagactccgtctcaaaaaataaaaataaaaaaaaaacagaagtacataagctctgtccagagaggtggagacagctcaaagcacggccccccactgggggcttccaggtcacaggcaggtgacagacagatggttgcattcttttgagtttctggtagtctttccaaaagaggcaatggaggcaatcataatatgcatctatgtctgtaagcaaaaggatgacttgaatagaatgggaggcagatttgtcctgagcggttcccagcttgaaggggcccaagatattttcctttcacatattgaacaagtgaaaccacaaatgaatgaacaagcatgtgctcactgacagctcatatgcatggtcacacaaacacaggatctcatgctcacaagacagcagggctcacacacacccagtcccaggcactgggttccacactcacacctacttgccactggaatttgtgcagaggctcagatggtcactaaatggggcttcacaaagacacagtcactaacccagcacatatacaaagggtgatgacacagccctgacttcatgaacacagtgcctttcagaaacaggtccctacaacagggatgacttatccactaagcacaatagacccaaggcctagggccacagtactttcaggggcccacaaaatgtttttttaatcagaagaagaatataaatgtaaatatattaataattaatatataatagtgtaacccagacatgacctcctgggctcaagcactcctcctgcctcagtgtcccaagtagctgggactacaggtacataccaccatgcccagctaatttttaatttttttgtagagatggggtcttgctacattgcctaggctggtctcgaactcctgggctcaagcaattctcccacctcagcctcccaaagtgctaagactatagccatatatatatatatatatatatatatatatatatatatatatattttttttttttttttttttttttttgagatggagtcgctctctgtcacccaggctggagtatagtagcacagtggagcagtcttggctcactgcaacctctgcctcccgggttcaagggattgtcctgcctcagcctcccgagtagctgggattacaggcgcctgccaccacgcccggctaattttttgtatttttagtagagaaggggtttcaccatgttagccgggatggtctcgatctcctgacctcgtgatctgccacctcggcttcccaaagtgctaggattataggcgtgagcctccgcacctggcatgcctggccatattttaaaatattttttttaaggaggaaaagatccacgaaagtaaagtgcctagggcccatcaatgtcagatgcagccacgtggacaaagaacactccctgagcacaagacacgaaagaacccggtctccagtgtcacaaacaggcctgcccagcagggtctgcccctgcccacctcctccagcctaggtaaggccacaaagccctgccctagtgctgacagcgtgggaggggccactgttggcccagccccacccccaaccaagatccctttgccagggattcagaggtagccctgatgcctggctggcctggcctcctaatccaaggcccgccccttggcccgcccctggcctgggtggggtgaccccctacaaaagctcagaatttccagcagcggctccttcctccaggagtctctggtgcagctggggtggaatctggccaggccctgcttaggcccccatcctggggtcaggaaatttggaggataaggcccttcagccccaaggtcagcagggacgagcgggcagactggcgggtgtacaggagggctgggttgacctgtccttggtcactgaggccattggatcttcctccagtggctgccaggatttctggtggaagagacaggaaggcctcccccccttggtcgggtcagcctgggggctgagggcctggctgtcagccactcttcccagaacatatgtcatggcctcagtggctcatggggaagcaggggtgggcgagcttaggctagagcaagtcctgtgggagatggcagaggcctggtctgagaggcaactcggatgtgccctccagtggccatgctcccctccatgcgtctcccctgccctcctggagccctgcaggtcaatgtttaacagaaaccagagcagcggtggattaatgcgcaagggctcagccccccagccctgagcagtgggggaatcggagactttgcaacctgttctcagctctgcctcccctggccaggttgtcctcgaccagtcccgtgccatggcagcccacctgcttcccatctgcgccctcttcctgaccttactcgatatggcccaaggctttaggggccccttgctacccaaccggcccttcaccaccgtctggaatgcaaacacccagtggtgcctggagaggcacggtgtggacgtggatgtcagtgtcttcgatgtggtagccaacccagggcagaccttccgcggccctgacatgacaattttctatagctcccagctgggcacctacccctactacacgcccactggggagcctgtgtttggtggtctgccccagaatgccagcctgattgcccacctggcccgcacattccaggacatcctggctgccatacctgctcctgacttctcagggctggcagtcatcgactgggaggcatggcgcccacgctgggccttcaactgggacaccaaggacatttaccggcagcgctcacgggcactggtacaggcacagcaccctgattggccagctcctcaggtggaggcagtagcccaggaccagttccagggagctgcacgggcctggatggcaggcaccctccagctggggcgggcactgcgtcctcgcggcctctggggcttctatggcttccctgactgctacaactatgactttctaagccccaactacaccggccagtgcccatcaggcatccgtgcccaaaatgaccagctagggtggctgtggggccagagccgtgccctctatcccagcatctacatgcccgcagtgctggagggcacagggaagtcacagatgtatgtgcaacaccgtgtggccgaggcattccgtgtggctgtggctgctggtgaccccaatctgccggtgctgccctatgtccagatcttctatgacacgacaaaccactttctgcccctggtgagtcttctgtaacctgcccaccttgtcaacctgccttgtcagatattaggtccagccttggggtactttagctttgggacattttcttcgtttttttttttttgagacagagtctcactctgtcacccaggctggagtgcagtggcacgatcttggctcactgcaagctctgcctcccgggttcatgccattctcctgcctcagcctccgagtagctgggatacaggcgcccgccaccacacccagctaattttttgtattttttagtagagtcagggtttcactgtgttagccaggatggtctcaatctcctgacctcgtgatccatccgcctcggcctcccaaagtgctgggattacaggcgtgagccaccgcgcccggcccccaaccttgggacattttcatccattcattcatcctttttttttttttttttttgagacggagtcttgctctgtcacccaggctggagtgcaggggcaagatctcagctcctgcaccctccaccttccggattcaagtgattctcctgcctcagcctcccaagtagttgggattacaggcatgccatcaacatgtctggctaatttttgtatttttagtagaaatggggtttcaccatgttggccaggctggtctcgaactcctgacttcaggtgatcctcccacctcagcctcccaaagtgctgggattacaggtatgagccaccgcgcctggcgcatgggcacatccattgagtgtgcacttggtgccaagttctgtgccaggcacaggcaattcaacatttattggaatgatgtagtccctgtctgcatggaattcataggctagaggaggaagcagtttgcctctggtcccatggccagagcagccccaggtgaaggttatgaattatttgtcccatctaatggtgttccagcagtctgccacatggtgggaaggaggccccacagagctgtgctgtctccttcccaggatgagctggagcacagcctgggggagagtgcggcccagggggcagctggagtggtgctctgggtgagctgggaaaatacaagaaccaaggtgagcttaggcctggcatgagggtgggggtgggggaggggtggggccattaagctgacggggtagaccctgacttaccctttctacctgcaaagtcctggctgaccagcaggtgagtgcctcagtgccctgggtgggtccatacatggccatggtgtccctgacgctatcctcccttcccacctaggaatcatgtcaggccatcaaggagtatatggacactacactggggcccttcatcctgaacgtgaccagtggggcccttctctgcagtcaagccctgtgctccggccatggccgctgtgtccgccgcaccagccaccccaaagccctcctcctccttaaccctgccagtttctccatccagctcacgcctggtggtgggcccctgagcctgcggggtgccctctcacttgaagatcaggcacagatggctgtggagttcaaatgtcgatgctaccctggctggcaggcaccgtggtgtgagcggaagagcatgtggtgattggccacacactgagttgcacatattgagaacctaatgcactctgggtctggccagggcttcctcaaatacatgcacagtcatacaagtcatggtcacagtaaagagtacactcagccactgtcacaggcatattccctgcacacacatgcatacttacagactggaatagtggcataaggagttagaaccacagcagacaccattcattccatgtccatatgcatctacttggcaaggtcatagacaattcctccagagacactgagccagtctttgaactgcagcaatcacaaaggctgacattcactgagtgcctactctttgccaatccccgtgctaagcgttttatgtggacttattcattcctcacaatgaggctatgaggaaactgagtcactcacattgagagtaagcacgttgcccaaggttgcacagcaagaaaagggagaagttgagattcaaacccaggctgtctagctccgggggtacagcccttgcactcctactgagtttgtggtaaccagccctgcacgacccctgaatctgctgagaggcaccagtccagcaaataaagcagtcatgatttacttagctgtttactgagcgcctaaaatgtccaggccccggtatccaaagggcacaggaaaggcttgtcactctcaccagatctgacgtcagtctaagggcggctgcttcccagggtggggcccaaatttcaagaggaagccccacctgatcggaccgtttccaagctgtcctggggcaggaggccggcgggaaccgaagctagacttgtcagagcctggggcggggctggcggaggcagagccagctggaggcggggcctgcgcctggctgaagtgacgtgctgggctggggcagggcctggaagaagccaaatcgaggcgggacctaagctgtgacgcaaggagaaggaggaggggcctgtatggggccgggtggggaggaggcggactcaaatggagatggggtggggctcagcaggggcggagccagggtagagactgagtcggcgcctggcgggtgttgtgacgcgcaaaccaggggcgggttctaagcggcgacgcgcgggtgctgggaggccttagaacgccgtggcgtgccgcaggacgcgacggctgcagaacatccgccgcaccgctgggggccaacgttgtcggaccgaggagtccgaggtggcgactgagtgagatacccagctgtgcggagctaggacgcggaacatcccrgaggccagcatcaacatgtcagtaccgcacccttcccatttgctgcctgtaggtccaccccgcgcgtgcggtccccaagtggccatgccaccctgcacgccctccccgcgtcagtcgttcgtttccagaccatgccgagccacacctgcccacagagtcgagctctcgaagtcctcattcccaaaagctccacagcctgtgacccactaggagggagggggaaaccgaggcccgggagagacggagaagccactctctgaggaccccggagccccgcccacagtgggtggggtcggcactgaaggggttaaggccgcggggaagccccgggctcagccctaggggcggatcctggggcttcctccctctagaccaaagggtgcggctgctgcagaggtggctgatgcaggtgaggggcttacagccctgtgaatggtgtgggaggtgaggggaggggggtgcctgttactgaccagtgtttaattggcctcaagctcaggagaggtaaggggagccaggaggccccctctggagcaggtgagtagaaggagggggctcagctgcccgcccacgactagaaaacccccagcatagacctgccggacrgcaggaccttggttaagatgggaaaacagtagggtttgggcacaggaggtctgggcccccaacctggtgaccgttggacaccctgtggatataggaaggaagctgtggtccttatctagggtgcctgcgaaactcaagccagtggggaaccaagcctgcagaggcaatactgctgtgtgactgtgggccaggcccagtgctggtgctgctggggccccatctgaggagacagttgggtctatatccaaagtgtcctgagatgggcagagttgggaagggggccatgggctccaggtggggaaggcagtcaagacaggccaaagctcagcctgatgggtgcatgagtggggccccaggatccactaaggcagtgggcatagcccaggtagttgaaaaggctgggagctggaggagactcggaacatagggagaagaaagggacaggaagactcccgggcagtttttcctatggagggaaccttgggtaggtttgagcagggggtatagtgtctgctttgcatcttctatcccatgccctagtggtggactaggaggactactggaagacagaaggccagcaagtagattgggtcggctgttttatagacctggtggttacagaccccctgtgaggggaggtcctgaggaggacaaatttgtagccagagcaggctggggccaggactcctaggttctgccccagccttaagcagctcatccatcactcccagcctccctccaatgtggggtagacacctggatctatctgccctgctctataggggatgggtctcttccaggtcacctgtgctatcaggtgagtgtgggacaaagtgcagcccaccactccccagttccagtatgcatggtcccccctgcactctgtcagcccttccctgctccaaccccaccctccctcctggcacagcccagcatggctgttatctacaggaggagagccactgtggtctgaagagaygctactgcctggagactggggtcttaacytccagcctggcactgagccacctgcaacctagcagcaggtgaccttggctcccagcctgactcagctgaacctggatcctgtgcataggcaagagctgactctgagccctggcccagccaagctgacccctacactagaccctacacaccggatggagctgatcctgagtaccagcccagctgagctgactctggatcctgcgtgccagccaaagctgcccctggattccacatgccaaccagagatgaccttcaatcctggtccaactgagcttaccctggatcctgaacaccagccagaggagaccccagctcctagcctggctgagttgaccctggagcctgtgcaccgccgaccygagctcctggatgcttgtgctgacctcatcaatgatcagtggccccgcagccgcacctcccgcctgcactccctgggccagtcctcagatgccttccccctctgcctgatgctgctaagcccccaccccacacttgaagcagcacccrttgtggtgggccatgcccgcctgtcacgggtgctgaaccagccccagagcctcttagtrgagacagtggtggtggcccgggccctgaggggccgtggctttggccgccgcctcatggagggcctggaggtctttgctcgggcccggggcttccgcaagctgcatctcaccacccatgaccaggtgcacttctatacccacctgggctaccagctgggtgagcctgtgcagggcctggtcttcaccagcagacggctgcctgccaccctgcttaatgccttccccacagccccctctccccggccacccwggaaggccccaaacctgactgcccaagctgccccaaggggtcccaagggacctccattgccaccaccccctcccctacctgagtgcctgaccatctcacccccagttccatcagggcccccttcaaaaagcctgctggagacacaatatcaaaatgtgagggggcgccccatattctggatggaaaaagacatctgaggccatccagggcaaggaactgtctttctggttcaatagactgccccgacagtctacaagcctcagcccactgaccatacctcagcccctagcccctggggggcagctttaacctgggcatgtttcctgggtaccagtggggccaggaggtggctctggctcagagccgtcagtgtggctgaataaaggctctcttgggtatggctgtgacagtttatttgttgatccccctaccctcacctctcacctcttctgcaggtcccttatccctgcagaagtctccagatccaccttggccctgaggccattgatgggaggatgcctgtcctttgcctttaccccccacctggctcaggagacagggtggctgttttcttccccattcactcattaccattcactgagcrcctactgtgtgtcaagccctggacgggacataggcaatgggtaactagacaaacaggcatacagtagcaggatccatgtggcacaggggaggtacagaggctttgggaacccaagtgacttcactccacctggggatccaggagacctcccagggcagtgatgtcacagcagagacctgagtgctaggtaggaattaaaccaggcaggtgaggaggtgggagctgactgttcttggaagagggaacaaggtgggcagaggaaagaaggggacttgtgacagttgtgggaggacacagtggtgtattgacaaagacggaacatgggagggaatgtaccctcagctcactgtaaagcccgctttggtgtgcacctgccactcsatgcccggggcatcatagccagcttgcggtgtggctgctttaaaaggcccaagagacccctggggaaacatgctttccccagctcctcctgtaaggatggggaggagctgggggagctttcctggctttccctgccatgtggaaggtgtggccatagctgcggactctaagcttacacccccctctctcctgcaggtttccatccttggggaatgaccacgcaactgggcccagccctggtgctgggggtggccctgtgcctgggttgtggccagcccctaccacaggtccctgaacgccccttctctgtgctgtggaatgtaccctcagcacactgtgaggcccgctttggtgtgcacctgccactcaatgctctgggcatcatagccaaccgtggccagcattttcacggtcagaacatgaccattttctacaagaaccaactcggcctctatccctactttggacccaggggcacagctcacaatgggggcatcccccaggctttgccccttgaccgccacctggcactggctgcctaccagatcnaccacagcctgagacctggctttgctggcccagcagtgctggattgggaggagtggtgtccactctgggctgggaactggggccgccgccgagcttatcaggcagcctcttgggcttgggcacagcaggtattccctgacctggaccctcaggagcagctctacaaggcctatactggctttgagcaggcggcccgtgcactgatggaggatacgctgcgggtggcccaggcactacggccccatggactctggggcttctatcactacccagcctgtggcaatggctggcatagtatggcttccaactataccggccgctgccatgcagccacccttgcccgcaacactcaactgcattggctctgggccgcctccagtgccctcttccccagcatctacctcccacccaggctgccacctgcccaccaccaggcctttgtccgacatcgcctggaggaggccttccgtgtggcccttgttgggcaccgacatcccctgcctgtcctggcctatgtccgcctcacacaccggagatctgggaggttcctgtcccaggtaagtggaagctgaggtctaggggtctgagtcaggaggtatggccctgttctaggaaggtcccaggagaagaccttgcctaggggttggtcctaatctaggcgttctcagcggaaggccctgtcctggagcatctgatgagggaggcatggctttgccctggaagatgttgaggggtagggaggcccagcctttggagtgctggcctgaggggagatattctgagtggaaggcctgagaagccactcagagactcgatacaaaggggccctacttgggctgggtgagtgtctcacacctataatcccagtactttgggagcctgagatggaaggattccttgaggccaagagttcgagaccagcctgggcaacatagtgagaccccaacctctaccaaaaaaacatttgagacagagtcttgctctgttgcccaggctggagtgcagtggcaccatctcagctcactgcggccttcacttcctggttctagtgatcctcccacctaagcctcctcccgaatagctggactacagatgcataccaccacacccagctaatttttatatttttgtagagatggggttttgtcatgttgcccaggctggtattgaactcctgggctcaagtgattctcccgcttttgcctcccaaagtgtgggattacaggtgtgagccactgtgcccagcctaaaaaattattagccaggtgttatgcacctgtagtcccagctgcttgggaggctgaggtgggaggattacttgatcccaggagttcaaggctgcagtgagctatgatcatgccactgcactccagcctggatgacagagtaaaaccccgcctctaaaaccaaaccaaactagagagtccctactgtagagttagaatcagattgtgacagtgaaccagaagagtttcttgaatgtggatgtgtgcccacatggatctggccagcccagcactggcttagcagctctctgcctccaggatgaccttgtgcagtccattggtgtgagtgcagcactaggggcagccggcgtggtgctctggggggacctgagcctctccagctctgaggtgatcattgcccctttgagcctgccatgtagcacatgctggggtcccagggtgggggacggccatgtcaagattrtagagcaggcatattgacacatatcttcccttctcctcaggaggagtgctggcatctccatgactacctggtggacaccttgggcccctatgtgatcaatgtgaccagggcagcgatggcctgcagtcaccagcggtgccatggccacgggcgctgtgcccggcgagatccaggacagatggaagcctttctacacctgtggccagacggcagccttggagattggaagtccttcagctgccactgttactggggctgggctggccccacctgccaggagcccaggcctgggcctaaagaagcagtataaagccagggcccctgccactgcctcttcttttccctgctgccacttttccagtcctggaactactctgtcccactcttgctctattcagtttacagtcaaccctcccaagcacacaccccgcttcccttggaatccctgaggggtagaaggggccagaaaaaacgcttataaaaccagaggccctctgagatcatgtgagtcctccatggcaaggaagcagttccagggagagtcaggttccagctagttagggctgccagcctagggctttgtgcctacacctcactaagcccatggagaggtcacagatgggccgtgcacgggcagatgggccccaaaaaatcttggcgaaggtcggtaaagtgctaagctgttgtctgcactctttcatcataaagtcacttttttccactgcctgaggtttggctgttgctcctgttatcccaagctctaagcccttcccatggtccccagacccaggcaggggtaggtctcgtctggagtgtcccgctgccaagtgccctgagaagccagtcctgccttggtgctccactgagggacgcttcggagttaaccaccgtgcacttgttcccgacgcggggctggggcgcgcgcagggcattgtgggtgcatagttcagccagcgcgtcgtcggctggtgggccccaggcgtggactaccattcccatggtgctctacgcgcagctagccgccgtcgcctgcgcgctcaggcctctgggattagtagttttagcctcgtggatgtgggcctgaatcggatggcctggaactcgccttcccggcgacctgtttggcagggcggggcgcctcgcgaagatggtggcgcgcgcggcgtgtggctcccgtcgtctggccaagtctcagcgcagcgcaccggccggcgtctcgttggcctggagcccacacccaccgggtccctgaccccgcgccccccgcgcccggttcccggcatgcctcgcgcccgtaagggcaacacgctccggaagggtggtcagcgccgtggaggaggtgagtggggtggggggcgcgggacagctgtatgagcggcgggcgggggtcctgctggatccccttggttgttctcgagggccctgggtggggaaccccctcggccagccccacgcagcttcccataactctaccgaggctggcacgtgccccagcagtcattggccacgtgcgtgcccaacttgagctcgctgcccactgcctgttgggagtccgcgctcccagcggtgacccggccagcccctccgggcctcagttgcctgctgggtggacaaactcaccggacagggcaggaagccagtcctcttgccaaaccctgatcctttcctggactggtcaaggaagttggcgggagtcctggcctgctccggtgaagagagggagggggctctgttgggaagctacctggttagggccttggcagcttggcaggcctgactccacaaggtagctgagtatcctggagcctgaggcagtcttgggactcgcttatcagcttagaccaggagcctatcttaatgcgttaaacacatatgtttactctgctgggatggggtgcctaccacgcacaaatttatttatttttattcttgagggggaagggaggagggccgggcacaggaaggaggaaaatacctaggcacaactttaaactggtcaccaccatggtgggttttgggtgggggacatctaatagggtgtggaacatgttcactgagtggtgtcagccccagacttaggactcagggaggcctggggggaagtgcttctgggtgagtcctgagaggatggagaagagagcaagttgtacaaagacctggcagctggagggaccccagcgcagtggagtgaatgagggaaggctgggctgctccggcaggtagaatagtaagataaaatgggagcaggctgggcgtggtggctcacacctgtaatcccagcactttgggaggccaaggcaggcagatcacctgaggccaggagttcgagaccagcctgaccaacatggagaaaccctatctactaaaaatacaaaattagctgggtgtggtgtcgtatgcctgtaatcccagctactcgggaggctgaggcaggagaatcactggaacccgggaggcagaggtcgcagtgagccgagatggcgtcattgcactccagcctgggcaacaagagcaaaactctgtctcaaaaaaaaaaaaaaaaaaaaaggtggcggggagcagaggccagtgcgcaggctggactttgtcctgcagatgaggggtgtgagtagttcttagaagtagggccagcctggtgatcacaccctgtccaaaactctgccacagcagccaaccttgccaatgtcagcccttggccctggacagaccccacacacaggagtgcaccagccctactgaactgacccttggctttggtttttcatctctgagagggacaccattctatcttttgggattatgaggtcgagtgaggtacccccagccatccctcatcagtagaggcaagttgagtgtcctattccaccttctccaggtgcccggagcagtgcccaagctgactcgggttccagtgacgatgaggcagccagtgaggcccgcagcaccgccagtgaatgccccagccttctcagcaccactgcagaggacagccttggtgagagcgggtggaagtttgacaggggcttggtgagggctccatgggctgaggacaagaagcggtgctgaccaggtggccttgcagggggggatgtcgtggatgagcagggccagcaggaagaccttgaggaaaagctgaaggagtatgtggactgtctcacagacaagaggtacccctggctgccagccaactcctacacccagctccaagtgtgatcaagggagggctggcccatatgaccccccttctcgacctcccccagtgccaagacccggcagggtgctcttgagagcctgcgcctggccctagcgtcccgcctactccccgacttcttgctggagcgccgcctcacgctagccgatgccctggaaaagtgcctcaagaaaggttggacctgggggtgtgtgggagacttaaactgggcagacactggcccttgctgcatgggctgactggaaagcatcccacagggaagggcgaggaacaagccctggctgctgctgtgctaggcctgctctgcgtgcagctgggccctggacctaagggtgaggagctgtttcacagcctgcagcctctgctggtctctgtgctcagtgacagcacagctagccctgctgcccggctccacgtgagtgtgcctgtgccccatgaaacccttcctgcaccttatccctcagcagagtggtgggttccccctatcttcagcctcctttactctgaggggagtgagctccagggctgggaacccaggttcacccgctgaccgtggcattgcattgcccttctcccaacagtgtgcttctgcccttggcctgggctgctacgtggctgccgctgacatccaggtgaggggtctttgggcacaggtggtagagcatctagggctgtaactctgcctctgagctcccctgcctctctgtgctcctaggacctggtctcttgccttgcctgcttagaaagtgttttcagccggttctatggcttggggggcagctccacaagtcctgtggttcctgccagcctgcacggcctgctctctgctgccctgcaggcctgggcattgctgctcaccatctgccctagcacccaaatcagccacatccttgacaggtaggggtggctgtccactgggagggggaggggatctcaaagaggcccccaagccacacatatagctcagcctgccccttccctaggcagctgccccggctgccccagctcttgtccagtgaaagtgtgaacctgcggatcgctgccggtgaaaccattgcactgctctttgagcttgcccgggaccttgaggtgcgagggacaaggatggggggtgcttggtgacaccacctgcccatcacaggctggatgcagggggtgccacacaaaacagaacagctttaggtcattatgcagaggaggtggccccaaaacagatttatctcctagatgtcatgatgggtgccctcagcagtggtgtcctggcctgacagaggccaaggaggggtcaaaggggccaggcagagaagagagggtctctcagtgaaaggaggggtttgggcagtgccctgttcagagccagcagagctcaagcatctaccacacaccctccaatgctcccattgcaggaggagtttgtttacgaggacatggaggccctctgcagtgtcctgcgcactctggccactgacagtaacaagtaccgtgccaaggctgatcgtcggcgccagcgctctactttccgcgccgtgctgcactccgtggaggtgtgtgtgagaacatatgtgtcctagcaagggtgcacccccaggcatagcagccaagcccagttgtgttggcacctctaccctgcagggcggtgaatgcgaagaagagatagtgcgcttcggctttgaggtgctctacatggacagctgggctcggcaccggatctacgctgccttcaaggaagtgctgggttcgggcatgcaccaccacctccaggtgcggggacggacagggaggggacatctggtgtggttgcttcagtctggcctgagctcactgccctctgccccccagaacaatgagctactccgtgacatctttggcctgggccctgtgctgttgctggatgccactgccctgaaggcctgcaaggttccacgctttgagaaggtttgcacccttgggcacctttctcttccccctattcccatttcctggaggcctggaattctgtagaggccggaagaggacccccagccctttcccttcccagctccccagggtgtcactctctgtccccactctagcacctgtacaatgctgctgccttcaaagcccggaccaaggctcgaagccgtgtgcgggacaagcgggcagacatcctgtgaagcaggacctgctgaagaggagactttctatgcccttggtccgtatttttaacagaagacagtgcaacaactggtctccaccagtatttgtcactttattttttttaatgacaaaaccaaaaacagacatggggtgggtagctgggggcccggacacttgggaccctgacccctttgtccctgcactcagccctgtggccccttcctgtcctgtctcaggccaggctaaatatgtgccttcctcagggctgtggggcaggcactagggggcctttcccttcctttcctttctcaggccttgctcccccaggatgacccactcttaggggggtggtggcatctggacaaatgccaccacagcaggtggggtggcaaagctacctggaatggatttgtgtgctgatttttaaggattattacagataattaaacagaacggtcagccttctgtggtcttaacccctgggtatttttctgttctccctccccatctactatcccaggcttgggcccaactggtcttccacgatgtcacctttgccctccaaggcagtcttccccaggtggtgcctctccccctactcagagcccagcctgtctttaagagctgaggctggaccctcactgggagccctggcagagtttgggtgattgctatgggggcagctatttctagacttcagaacctgccatctggggtggccagagagtgttgacaggccacaggaggagccaggaggctggtgccccttcccctgaccttgggccacccaaagcgaggctttggcaccagaggcttggctaggcctggcttgaagagatcaggagagggaggcagccattaagttaacaacaggttcttgtacaaaaatctcaccaaggaaatagtgtagatgtggcagccagcagtagggaaggagagacctgcccatagccactttattcccccaccaacacacacccccaggccccagatccaaatggcatctcagctgggtgcttgggcctcactggagttgagcctccgaagctggctgaggctggccaagcggagtttgagtagtgtctcctcctgcgtgcggagcgtgtgtgccaggatgcgcagggattcactctgcagcactgtgaatgggaagtgggggatcatcagaccatgtgccaccccgtgacccctgcagacccagcccaggaccaggggcagccacgggcctcccgccccatccttcactgctgcagcatctgcagttactccttccagctgcacagaagggcctcccagtccccactgccttgctttccatt

SEQ ID NO: 97448 - DNA, 15223 bp, Homo sapiens
aggtaagaacacttctctcctcagccacccaaattcctggaagccaactctcacctttcccccggtccagccttaactccccaatcccttccctccttgactcccacccccaatcccacgtgcactctttggttgaggggtggttttgagaggggaagacattaacttgttagcaagtaatgagaattctaggatcaaccctgaaaagtttgtaaaagtgcaagtttctagcagactaaaggaagggaagtggagaaaaaggagaattcccaaaagtgagactggggtggggttagagggcgagctggtgaagggacagtgggggcccagcagggtttagaagggacagaggggaacctcagttaggacatgtgtccctacaagatctgagggtgagtagtgcagtaggagaggtgtgtgtgtgtgtgtgtgtgtgtgtgtgtgtgtgtgtgtgtggatggagacgcttcagggaagacggtgtgttgagggaggcctgagagtgagagcaagtaaattgggaagctttggaggggcggaacaaaacaggagactgggatcggagtttgaaaagcagagctggagaggtgatcgggtggcattgaatatccccaggactggggaaagggacagaaggggaggtggcaagaagacgtgagtttaacgtagctaccacaaggatgggtgggagagagatcagacggaggagaagagctcggttagggcattttgggatttgggggttggagaagtagaagacttgccccaactctctcctctctctgcgggtgtgggtaaggagagatggtcctatggcatttgggtagcaaaactgcaggcagcaggcttctcggtgtcacccagcccccctctgattgcagcggccgctcccctccctaccgctgctgcattcatttcccagtcttgggacctcctggctgtgcccctccctcccttccttaacagtgtcctcttctccccgctccgtttgtgtctctccgttggcacgcacgtctccccactctccactttcctgccgcctttctttccccttccccccttttgtttctctcatctttgtgtgtctctgcctgtgtctccctctcccttctgcttgggtttctcgggcagccattccctctccctgggcccagggaagtcggagcctgcttgggtccgcccccttaggtgtggtccccacctcactctcacattcgcctccggggctatttttactcgtgggtgaggctgtgccgcagagattccggccctgtgtcctgtgagaggatggttattgcagtcagaggacttgtgctgggagaccctggcagcaggttaggggtagccttagctgcccaggcctcatcctcactgtcccttcccccacatccttgacaggaaggaagccggagacagagagatgaatcaccctcagcttagggggaggtgtcccttgggccaatgaggtcaccacttgctaattagagggcagcccctctctgtagggccctccacatctctagcgcgaggcccagggccccttgactagactccccacccaaagacaccttggattggaggtgtagagaaccaaaactctggctcccaaaccccacccacctctcctgtcttcagactctactcccttcaggaacccagaaatccaggcttctagcctacaactctggcctcactgaagttccacacccttccctctctaggattcagatcctcccaagttctccaggacctcctccctctacctacctcccacctgtcctcagtgtctggggaaccagaagcctgcctttgcaaaacagtttcccattgatctgccttaggtttgacccaggcccaagggcaaagagcccatagtgaggggacagtgtatgtgtcatgactaggcagaaaacagctggtctgggagtgggaatgcagggactggcctagggatgggtggggtgcatcaggcataaccttgggttggggttacttttcaggctggcagtgatggggccaagattgggaactgcccattctcccagagactgttcatggtactgtggctcaagggagtcaccttcaatgttaccaccgttgacaccaaaaggtaggcctgcttatgttccttgaaacacccctggtgtacacatgtgtgcaaacacacacccacccgagtccttctgtcatgaacatttttgccctccccctggagtccctttcttatcccacgtcctccattccccctttctggttcttcctgacccccatttccagtcctgattcctgatcctttctccaggcggaccgagacagtgcagaagctgtgcccaggggggcagctcccattcctgctgtatggcactgaagtgcacacagacaccaacaagattgaggaatttctggaggcagtgctgtgccctcccaggtataggggcactcagaaagtggagaggtggagcagggagattctgggaaacagacagtttgcagaaatggaaaacagagatggtggtggggctggggcaggagagctagctgaggttcctcccaggaagacatcttacctcatttttcccattggctttcaggtaccccaagctggcagctctgaaccctgagtccaacacagctgggctggacatatttgccaaattttctgcctacatcaagaattcaaacccagcactcaatgacagtgagtcttgtgggtcagaggcctgggtcctgggaggaatagagaggacccagcgggtaggagacattaggggcacctggacgttcagatatcagggagatgaagcagatgttcgtaaatttcccccagcttcccatttttgctttacctctatatttccctgcattttcattggccaagacttttaagcttttctcatttgttccctagcctcttctgccccactgaggacgttagttggctgctggcctgttttctggcagaatagggtcatgcttaagaacagtcatcactctagatccagactacctgagtacaaatccaactagccgtataattttgagcaatcatttcacctctctgtaagtccatttccagatccacaaaattaggatgacaatacctatttcatgggttgatataaatttttttttttctttttttttgagatggagtctcgttctgtcgcccaggctggagtgcagtggtgcaatcagctcactgcaacctctgcctgccgggttcaagcaattctcctgcctcagcctcctgagtagctgggattacagacgtgcatcaccacgcccagctaatttttgtatttttagtagagacagggtttcaccatgttggccaggctggtcttgaactcccgacctcaggtgatccacctgcctcggcctcccaaagtgctgggattacaggagtgagccactgcacccggcgatataaatgagtttgtaaaatgtaaagtgttcactttgggaggccgaggctagcgcaccacctgaggttaggagttggagaccagcctggccaacatgactggtctctactgaaaaaaatacaaaaattagccagttgtggtggcaggcacctgtaatcccagctactcaggaggctgaggcaggagaatcatttgaatctaggaggcagaggttgcagtgagccgggatcatgccactgcactccagcctgggcaacggagcaagactccgtctaacataaaataaaatgtaaagtgcttagaataacacatagaaaagtaactacatgagtgttagctattattattttggactcaccattagtatccacccccaacgggccttttcggactatgtcaatcttttcctgaagttctaatcagttccctctcttgcacagatctggagaagggactcctgaaagccctgaaggttttagacaattacttaacatcccccctcccagaagaagtggatgaaaccagtgctgaagatgaaggtgtctctcagaggaagtttttggatggcaacgagctcaccctggctgactgcaacctgttgccaaagttacacatagtacaggtgtgtggttattgcgggaggagaggatgaccactggagtggccctttaaggagctcccacatgggcttcccctgacaaccactctaaagacgatttctttcttagggtggttttcataaattgctaccaatggcagaccccaccccagtcctttgcagcagtcattgctaacaagaccactgcttgagataattatattccatgatgtaagtcatgggtgcaaacagactagcaaagaggaatacatcccagtattacttttgaagaatgctcttcctgtctcggtatcactgccaaattcccagattagacagagcaggcttttcctaaagtcaaagctttaactttctttataacttcagtcttcacttcctcttgtggaagatcaaaactgctggttcccatgtttttgtcatagtctcaaagctatggtttagtttgtgcaacatgggcctgacatcagtctgccacacaactatgtagtgaacatctgtgtactaagcattgaaagatacacaagtgtatggtgactgggccttgctctcaaagggttgaaatctgagacaataaaatattcacatgaaagttaagaatatatgatgaaaagtcagatgggccgggcgtggtggctcacgcctataatcccaacactttgggcggccaaggctggtggaccacctgaggttaggagttcgagaccagcctggccaacatggtgaaaccccatctctactaaaattacaaaaattagccgcacatggtggtgggcacctgtaatcacagctatttgggaggctgaggcaggagaatcacttgaacccgggaggcggaggttgcagtgagccaagatcgcgccattgcactccagcctgggtgacagcaagactccatctcaaaaaaaaaaaagtctgatgaaaaatatagagacaaaagtcacctgtgtcagtgcctgaagtggtatagggggaaaaagtcactgtggaaattcaagaggagaattttataagtaaattatatctcaagttttaaaaactcaggaaaaatggctggttattaaaagccaggatttcagtaagtgagaaggaaggctaacgacagtacaagacagtgaggagttgagctggttttatcatgtcggcctggggagaagggaaagccaaggtggcttccctgggtctaacatgttggtccctctcctctccccatcctcaggtggtgtgtaagaagtaccggggattcaccatccccgaggccttccggggagtgcatcggtacttgagcaatgcctacgcccgggaagaattcgcttccacctgtccagatgatgaggagatcgagctcgcctatgagcaagtggcaaaggccctcaaataagcccctcctgggactccctcaaccccctccattttctccacaaaggccctggtggtttccacattgctacccaatggacacactccaaaatggccagtgggcagggaatcctggagcacttgttccgggatggtgtggtggaagaggggatgagggaaagaaatggggggcctgggtcagatttttattgtggggtgggatgagtaggacaacatatttcagtaataaaatacagaataaaaatcaagtgtttttacgcaatgggggtttaaagtgtgggcgacatggaatgaggggtgggtcagtgatcttgagctcagggcagaagccaggaattaagaagggaaatgtttgtggtggggctgctatgtttcgtgccggtccgccggtccgccgttgcgctgttctgaggtctacgaagcgtttgcagccccgtcgccagggccggccagatctgggtgggcctgggcagcgctcgctgggcggtgccgatttctggcaaggggggcgcagtctggatgtaatgggcgcggcttagcagggcggaatgggcgtggcccgaagaagccccgccccgtcccgcttagacaatgccccggagccgccagaccgtcgcgcccctgccccatcgtagtatatgagctcgcctacacaaggacccscgctaaaagccagagctcccagtccccgaggcttgaagacggggactcccttctccaccaactctgtcctcggggggtggggccccagccgagatcacagcgcgacaggagtgggggtggccgctggaggtgagtcttgcgtggggggccctgaaccgtgtgggggccggagtttgggggtgccgggcccatgcctgcaccagacagagagtatggggagccggtatttgggcgcggagctaggcggggtggactttgggacatagacggggaaccgggtsctggagccgsgagtagtgccagcgccccggaaccacgccccctgttaccccgcccctcgcatttcgttttagacctctcccagtccttcgggactcggtctggtttatactaggtcgygctaggggcagcgtgaccagccagggcggagagaggatgcttaactccttaggctcgaactcctcccttcctacccacctctctcccttctcgttcgggtattcaggacttccattccccagcccctgcctctccagctttctccttctgtcccataacccctgcgggtcscgggctggacttccagtccctgcggtagcgagcagctgagggttaagggggcggggctgctgcatttttggggagtgagcgcatcctagtggctgccaagaggggcgcccgacagggacctcacaagcccccaagcaggggcaacaggtgttttggagattagagaccctagccttgttcctcaggctcctcttaaagaatctgacccctgagggtgctgggtagagtgaggtcgacaggagcggaaggtctggagtgggtggggcggagtgggagggacgcctagagatggcaggaggaagacctgggcgctcttaaccacccccaacgcccttgtctgcatgtctttttctctgtctcctccttttctgtttcttctcccagacaggtgaagaaacaagaaaactaagaaatccgagcggttggagggggagtctgtgtggatgggatggggacgccgggggaggggctgggccgctgctcccatgccctgatccggggagtcccagagagcctggcgtcgggggaaggtgcgggggctggccttcccgctctggatctggccaaagctcaaagggagcacggggtgctgggaggtaaactgaggcaacgactggggctacagctgctagaactgccacctgaggagtcattgccgctgggaccgctgcttggcgacacggccgtgatccaaggggacacggccctaatcacgcggccctggagccccgctcgtaggccagaggtgagcgccgtggcgcgggtgtggtatggggaaaggcagaaggaactggatgtcggggctttggggaagaattgaggatgggggtgtcacagctccgtgccctcttctcctatcctaaggtcgatggagtccgcaaagccctgcaagacctggggctccgaattgtggaaataggagacgagaacgcgacgctggatggcactgacgttctcttcaccggtgaggctgsggggaggcataggtcttggcacagggaagtagagtttgggagactcggccgtctggagccttgtttctaactcactcccgccctcaaacctccgcggcctcccggactcaggccgggagtttttcgtaggcctctccaaatggaccaatcaccgaggagctgagatcgtggcggacacgttccgggtgcggagcgggaccagcctagggagggagggggtgcaggtgggggtcggaagggcctgggcgcccgctgaggaaatgagaggcagagagcagcctatgtttgaagataccccatcacccctcccgcgcccctgaatacctcccttcgctctccctaggacttcgccgtctccactgtgccagtctcgggtccctcccacctgcgcggtctctgcggcatggggggacctcgcactgttgtggcaggcagcagcgacgctgcccaaaaggctgtccgggtgaggagggggcggggccaacgaaagtgggcgcagttctgggcccgggaggccgggagctgggaggcttaggaaattagccctaacccctgccctcaatgggctgtccatcttacatgaaagaacacaggagaaaataagaagttacaacagcaggactgggaacaggggtgattaatttgctcttccggagtttcaggaaaccccaaaggtggcacctaaactgtgactctaaggatgggtaggacagataggaggggctggggaaggtagggggttgaaaataactgcatgtgattccaaggtggaaattagcaaaggtaactaaagtacttagtgtctgacatatcgtaagctctatgtgcttgctgtcattattttccacaaatgtcagtccgtccccagcccttagtggtggttgagcaggcagacacagctgtggagaggttctgagactcgaacacttcctctttcctctaggcaatggcagtgctgacagatcacccatatgcctccctgaccctcccagatgacgcagctgctgactgtctctttcttcgtcctgggttgcctggtgtgccccctttcctcctgcaccgtggaggtggggatctgcccaacagccaggaggtgagagagggcaggaactccaacaccaagcaccatcagagaaaagagtttcaggctttcctagtgggaggaaggaagggtaccttctctagaagcctgggtggggccactctgagctggctggaagagtggcctggctcagcctgaggtctcactcccctctccccactccatgtcttccctgtgcaggcactgcagaagctctctgatgtcaccctggtacctgtgtcctgctcagaactggagaaggctggcgccgggctcagctccctctgcttggtgctcagcacacgcccccacagctgagggcctggccttggggtactgctggccaggggtaggatagtataggaagtagaaggggaaggagggttagatagagaatgctgaataggcagtagttgggagagagcctcaatattgggggaggggagagtgtagggaaaaggatccactgggtgaatcctccctctcagaaccaataaaatagaattgaccttttagactgggctgtgactggtgtcttactggggcaaagggatagggcagggctgaaacctgagtttggggtcagtgcagggaagaaggcctcttattcaaaaatcttgttaggtacttatcaactcattgcccaaccatgtcataggtacttgagcacaagatgaacaagacagaatttctatcatgggaagtgtgtccagggcagagaaaagagtgtatgggtggattgctcactgaatttatctaaatgttagatgattcagagactggtagattaccagtccacccctatttgataaagaaaaagaaatgacacttccagggacattcattttcattcattcatttaatgaggcttagcaatgatatcaaaagggtcagtctcctgacgttggggagctcacagtacatgcaaatttcttacaaattgaaatacaggttgtcatggaacaatttacagaaggctgtttctatgagggaaataaagggggtgtgccctagggcatcaaagtatatgcaaggggtggccaaggagggtcaccttcccagaaaaggccatacttgaactaaggataaataagaattagccaggcagatagtgtgaaggagggaaaggggtaatacaggaagaaggaattgcactgggcaaagacattttggggctagggagaattctctaaggctggcattttctaagatgtgcatgtggaatgacacaggtaagcctggagagtggacaaagtgctgtagtaccttgtatccaaagccaaggcacgtgggcacagagctgaagctaaggagagtacttcagttctgtaataagggctgtcaggagcagttatctcttgagtaggatctctctgacttcagggaggaaagcaagggtaggaggatgaggtggggctatgggtaatccaggaaggaagtgagcagagtacattcacgtggcagcgctgggcatggaatacagtgtgggtttgacagtgatgttaagatagaaagactggacttcatggctcattgtgtgggagtaagagagaaaggaggtctgcgtgactcccagtttctgggttgggcaactgggttgttaaagagaatacagaggagaattaagtgagcagcttcagagatgacaatgagttgggtttgacattcagagtgcgaaatgcctgaggtcagtcaggcagaatgtctaagtggaagtttgttaatcccaaatctgagatctgagccagagagagttctgagtgtcatttgcagaggagggggctgaggactgactgttgatgagagtgtcccagaagaagagaaagggacaaacctagaatggtgggaaatactgtagggatatggagcaaggaagaggagtccaaaaagaaaacaccagcaacaaagaaaaacagcttaaagaatcaggccgggcgcggtggctcacacctgtaatcctagcactttgggaggccggggcgggtggatcacgaggttagcagatcaagaccatcctggctaacacagtgaaaccccgtctctactaaaaatacaaaaaattagctgggcgtggtggcgggcgcctgtagtcccagctactcaggagcctgaggcaggagaatggtgtgaacccggcaggcggagcttgcagtgagggagatggtgtcactgcactccagcctgggcaacagagcgagactccgtctcaaaaaaaaaaaaaaaaggagctagggcttgattgggtatagagaggacactggtggtgagggagacatggaggttataggagagatgggagtaagtttagaagtaagaccagtggcagagacagcctggaacccaggtctcccaactcccagtctagcacttatttctataccatggtgccttcctcttccaggtgaggaaccaaggaggggagagggattatggggagctgggatcccctagcttgggaggtttggagtaagggcttcccttcaaactacaactgcatagatggtggaggcatcagcagggtccgctgtggacagccggcggggcctgctgagggctagatggtccagatccgcatagagcaggctctggaggaggaaggggaggaagacaagatggtctccacagtcttccttggggttcaggcctttttttttttggtccattttcctcagagattctggctatccccttcccatccccatgcccttaccggttcctggtccaggtcccctggaatcttgggctcttcctcctttactggcctctggggctcggttttcacaagtggagctatgtgggggggacagagctgaaggatggagagaaggtgaccaacgtgtctgctcccagcaagggctcagactcaggaattgaggggtggggagtgggcatgtaggagaaagaaaatggggtggaattagtctcaccaaatctagggagtggtcgaatcggttgcgggggcaggcgcctgtaagggacatatgagtctttgagaaccaccagtcttgtctcactggttctcctgggactcgccacgccaaggacagcccagcaacttgaaggctcagaccggaaacaacttagactctaccccaccgacagtccagcccaggctctaactctgctgcacttccagctcatctgctctggtggggctctactcaccagccagcggcctcgctcccacctttgacctctcccattcttcgccaagccaggaccagagctctaggtctagctctttcttttgcgaaggttctggtcctgccccttccacctctggtcactccccatttaacgaggccgggtccctcctgctcacctgtgcagccaccagaccaggcccaaagctcccagtccgagcaccaacccagcgcccagcagcgggatcaggagctggggatacacggaccctgggggaaaggcgtggcggggagggatgctgaggtcaggggtttgacgagggacagccagcagtcccgctcaagaacccccagccaaggccctcttccctcctccgggtatgtgtcggagttaagtacccttgtgcgcacaggcctgcacctaccatgggtaggcccgggggccttgcaataggtcctgtcccccagcacgtgaagcactgtacggctctcgtcctcgtggcggcccttgcagaaaaaagtgcccgagtcccccgcgctcaagaggagctccagccgccggataccagagtccagggagcgtaggcggccgacgaaaggctggaggggaggcacggtgggggtcccgctcgaagaggcccacaggatcggtcggcgtcctttggacaggcccttgcaggccgggaagctgggtgcccagacccagcggatgggatgagagactcctccgcaggagagattcacccggtccccagggcggccgtccagagaagctaggagaggccggaggctgtggttagggcacgtccacagggcaagacgaccctccatcccgtctcctctttctcttctctgttctgcactccagccatcctggatcttcccacacacaacccaccctactaggcggcccttatcttgcttcagcccctctgcgtctatcacaactctcccagggatcgcttacccccagggttcccttgggccctcgagagcagcagcggtagcagctgcagaaacacagccatggttaggatgtggtgaggagaagctgcgagcgaatcagcggcgtggggccggttggggggggaccggagggaagttaggcgtggggagaacggaggggctggggggctccgataagagagggggcggggccaccagctgcccagatccctttgggaatcctcgcaggcaaactcggagtcttcaaatggttctcacttaaaatgtgtgctcgggccatttacacaaatgctttggcctgcttaacttttcaggtgcgcctgtaatcccagctacttaggaggctgaggagggaggatcgcttgagctcaggaggtcgaggttgcagtgaactgtgatcaggccattgcactccagcctgggcgacagagccagccagaccctgtctcaaaaacaacaacaacaaaaactcctgttttgtaggggattgtgataacgaaataaagtaatacatgtaaactgcttagaatacataggatcactatgtaagtgcttgccattattattactatttctattcttttttttttttttttttttgagtcagagtcttgctctgtggccaggctggagtgcaatctcgactcactgcagcctccggctcctggattcaagtgagtctcctgtctcagcctcctgagtagctggaactacaggtgcatgccaccacaccgactaatttttgtattttcagtagagatggggtttcaccatgttggccaggatggtctcgatctcttgaccttgtgatccacccacctcggcctcccaaagtgctgagattacaggtgtgagccaccacacccggcctactatttctattcttattttagcttctacctcacctctctgtgcccatgctgttcctcctggcttggtaccctgcccaagttggcaggttttgactggggaggtgctttggagcaggtgcacacagccacacctaggacaattgctgctgctggactggagcaacaaggccacaccaagcgcaagtggagcacgggtgacatcctgagaaccttcatgggagcctgaggcagccctacttagcagacctgtggtggctctcctggatgagtagccccagcccctgcctctgctgctgtggcatcacagaagccatcagtgagtcacttattgctgagcaggcattggaaagaccgagtgggggctgaatggagattaatttgacccattcctcccccaatttccaccagcatgcccctatcaatgcccagcagggacccagggacccaaattcagcaattaatttgggccacatccttttgtccattttccaggaaccagcagaagctgccaccatggacactgtaaatcacagaggcctttgatgatgctcattcagaggactgagcagcaggactcttagctggggaccaggaagggcatcttggcctgaaaccaagaaccacaatggcattggccactagtggcacctgccttcccccatccctctctcccatccctactccccactcagtcctgctcagtgccttcccaccccttgtcttttctctggtcagctgcgtagtaagtgagaagggaggggctaccagaggcagggaagggaggagcctttgggtttataaattccaaaaaggccactcaactcctagagctggatccttgaaaatctactctatcagctgctgtggttgccaccattctcaggaccctcgccatgaaagcccttatgctgctcaccctgtctgttctgctctgctgggtctcaggtgagcacctgggggccccaaagacctggtttgcctggtcaggacctttacaccctgctctacccacttcccggccctacccaccactcgggatcccaacacccccagccccaactggctcagctctcctgtgccaccaagaccaggcttccctatgacagcctccttgctctatttctcaaaaagccaggtctccatccatcctccccacctccaagaaagacccatttctctcacctgccagggctctgggtcccctgttccccactccaaggtgtctcctccttggaaactctggtatccagttccccaaccagccccacttcaatatgcaactctccagagtctagcttacctgccttctcctctatctgctgtgctcagtaaggtgtcctctcgaagacctaggcatccagccccaggctccttttgtaacctaccctccccatctactccatcagggactcacatgttcagtctctcagccatggcctttcctagataccccctactcccctcctgggttgcatacctcctcccatacaggggatacaaactttctagatggttgcagtgacatctaagagc

SEQ ID NO: 97449 - DNA, 22010 bp, Homo sapiens
aaaaatacaaaatattagctgggcgtggtggcaggcatctgggaaatcccagctactcggaatgctgaggcaggagaatcgcttgaacccaggaggtggaggttgcagtgagccaagaacacaccattgcacaccagtctgggctgcaagagtgaaactgtctcaaaaaaaaagaaaaacagaaatgagagaggacgcccaaggtggaagctgcagtcttttgtaacccaatcttggaagtgatatcttgtcactcttgctatattctgtacattacaacaagttgctaggttctgcccacactcaagctgagaggacagtgcagacaggaggtgagggtcatgggggctgtctttcagggtgcccaccacactgcaccctgccagttgagggcctgtccagtttttcttttatttcttctttttttttttgagatggagtctcgctctattgcccaggctggagtgcactggtgtgatctcagctcactgcagcctccgcctcccgagtagctgggattacaggcacataccaccacacccagctaatatttgtatttttagtagagatgggattttgccatgttgcccaggttggtctcgaactcctgacctcaagtgatccacccacctcgggctcccaaagtgctgggattacaggcgtgagccaccacgcccggccagtttttcactattatcagacatgctggagaggatgaatgtgtatttttttaacccacttgtgcaggcattcctatgggatgcattcccagcagcagaatttcaaaactaagtatgccaactttatttacatgacccaaaaaatgttgtattcatgtttcgcatatacgagaaaccttcctatggttcacacttggaggggctccagaaaccaaccaatgcagtctctctcagctccctctagagatcagttaccaattgcttaagtgtcttttcagagagacgtataagcaggtacaagcaaatagagaaactgattgattttctggcttttctatccagtggcaatctcctttattctatcatttttttgtttgtttttcaatctaacaacatatcttgaagtttggacaaaaagccttcattttatttatttttaaaaatagcccagggggctgggcacagtggctcctgcctgtaatctcaaacccaggacgctgggtttggggatagggcagatgtatgtcttttacaatctgggaacactcagcatggtctgtgctggagggcagatggtggcagagaggctgagaagcgcggcagtgacgagggtaagacggtcccaagcccgaggggcttggccccttgtttattccacaaagtggaggccaacacctactgagattaagaacctgggccctgtccctgtcccgtgtctccgcagcctgtgacgtcaggcttttgcttccagatccttggtttccccatctgtggagtggggattaaaagattgttgaactcatggcctgctgtgtgagaattcagtgagttcagacatgaagttcttgagaaatattaactactattattgccaggggtctcactctgtcaaccctggagtgcagtggcatgaccttggttcactgcagcctctgcctagaggggtcaagcagtcttcccacctccacttgtcgagtagctgggactacagacacgcaccaccatgcccagctaatttttgtattttttgtagagacagagttttactctgttgctcaggctggtctcgaactcctggcctcaagtaattctcctacctcagcctccagagtagctgggactagagacatgtaacaccacgcctggctagttttatagttgtagagatggggtcttgctatgttgcccaggctggtctcaaactcctgggctcaagcaatgctccaacctcagcctcccaaagtgttgaaactacaggtgtgagcctctgcgtctggacacacacaatgatgacaaagttgaaatacctagagtttgcaaagcatgtatcaggcagacctttaaaaaaaaaatcagccataaactattttgtaattgcaaagaaagaaaagaaaaatccaagccagagatgatcttactcccatttcttagcataaagcattttattatcttttttatttgtttgttttgagacggagtctcacactgttacctgggctggagtgcagtggcacaatctcagctcaatgcaacctccgcctcctgggttcaagtgattctcctgcctcagcttcccaagtagctgggattacaggcacccactaccatgcccagctaattttttgtatttttagtacagacatggtttcaccatgttggccaggctggtcttgaactcctgacctcatgatttgcccgcctcagcctcccaaagtgctgggattacaggtgtgagccaccgcacccagcctattagcattttttgagacagaatgtcgctctgtcgcccagattggagtgcagctcactgcaacctccgcctccccgggtttaagcaattctcctgcttgaattggaggatcaatcaggagactgtatttgtattcctgagtagctgggattgcaggcgcctgccaccacgtctggctaatttttgtatttttagtagagatggggtttcaccaggttggccaggctggtctcctgacaacaggtgatccacctgcctcagcctcccaaagtgctaggattacaggcatgagccaccgtgcccggccagtataaaacactttgtccatgttgtcattgtgtcctagcctatgtcatccaacctatatgtactgccagtttgttcttctaggaaactcagacttggtagttgattggtttaacaaatgttggttaaactgggattatttgggaaaaaaaaattgtgtatatcaggaaaggccagattacccccagattgcagtggcttgaaacagccaaggtggattttgtcactcgtgctgtattgagtgtcagcttggagcccgtgcggacagatcatgaaggttgccaatggacatagtaaaggcagaggggtctggtcttccattagcaattatgtgctcttgctgaattcacatgtgtcacttctgctcatatctcattggccagatgtaatcacatggcctcacaccttactggccaaaattaatcacatggccgcactcaagctaaatggggtcaaatgctggccaagtgtggagctagaaatatatggcaaatagcactaacggccatcttaacactttaaacatcttattttaaccaagaacatttaaacagacatctcttgtacgtaggaccaagaccctttctttcagtattggtctcctagttagcacacgacattacattcttgtttttgagacagggtctcactttgtcacttggactgaagtgcagtggtgtgaacacggctcactacagcctcaatctcctggactcaagagatcctcccacctcagcctcctgagtagctgggaccacaggtgcatgccaccatgcctagaaaattattgttgtttttgtagaggtgggagtctcactgtgttgcccaggctggtctcgagctcctgggctcaagcaatcttcccacctcagcctcccaatgtgttgggattacgggcatgagccactgcgcccagtagaacatcacattcttgtataagctccacccacaaaccacaatgagtcatttttttaagtggcttgagaacctaaagacatttatgaaacaaactgggggctgagtcttcctaggtttttataagctttttcattaaataatttacagttgctttacttgtacctaacttggcagcatttttttttttttaagagatggagtcttgctttgttgctcaggctggagttgcagtggtgagatctcagctcactgcaacctccaccccctgggttcaatcgattctcctgccttagcctccagagtagctgggactacaggcatacaccaccatgcccggttaacttttgtatttttagtggagacggtgtttcaccatgttggccagactggtcttgaactcctgacctgaagtgatctgcccacctcggcttcccaaagtgcagaattacaggtgtgagccaccacgcctggcatgtttttcttttaacaactcccttttagtctttccaaagcaagcaatctggtttgtgtataaacaactgtcttgcattaatttcattagtttgatagtaaattaaacaagaacttctggcataaacaggtttggatcaaacagctacctttcaggaagtaaacagcttgagagatggaagtggaattgcttagtcataatagtagcctgctagccccagcagtgggcttcacagatgaaaaggaaagtgtctttcaagttggtggaccgagttaagtgagatggtttcagagagttttgttgcagtattactgatagaatttcagcctacattttcatttcactttctgacatgagttcccattttgctcactctggagtacaccctggtataccgctctccatgcttatacaattcagggcattcaaactcacgtgtgtcctgatgggttctgagggatgggaaggcattaacaggtagagaacaggaaggatgggagagagattttttggggggcggcagcaggggccacagtaccaagtttggatttaattctaaaggcactgggaagccattggatggttttgattattgtagtgacagagaaggcagcaagagttaggagacgtcacccaggcaagagatcttgatggtttggaccaacaagaatggggagaagtgaggattccgggagattaaagcagctcctgttttttctccttcctgctgccaggttgtcctcacatgggtgattgacagggcattggaggtacctgttgataactaacttgcagtttgtgttcagggagcactgactccgtttggccacaatgcaggttggatttggggtttaaggctgggctccagtcagccctcgggagcccctgggcaggaaaacatggacaggcctacgggttcttctgccatttcactggccactcctccgtgtcctttgctggttgcttctcattgtcgtgactgctaaagggatgagtgtcccagtctctttgtgagctcatccagtctccattcaaacactgatgactcccgaatttctctctccaggctatgacatcaatatctatctacattgtttagtcaacatccgaaacagaagtagggactccgtctctaacctcctacagctgtgtctatttctcctctctaccttcactcgactccgcccacactggctcccttttattccttctactttcaggatttgtctttgctgttctgtcctctttgcacacttttccagccatctggaatggcaggttgctcacaggtcgttttcttgacttcccttgcttgctaactttacctcgctatggtcatatcccatcgccctgtggatgtgcgctagttaacacttagcacagcctgtgattatgtctctccccagtggaccgtggggcctgtgagggacgtggtctgattcggtcgtcgccgagcacagaactggacagggtactcataacagatttttgttgttgtttttaaagaaaagctaacatttgagtagtgactgcgccaagcagtcaagcacagcccctcgggctcgatccccataaccactctagggttaggtattacccacgtttaaggaacaaaaatcgagggaaaaatcttatacaactactagtaagtagtcattccattttagcagagcgaatgagcgaatccacggaaggccggggagcgacgtgagtggcgagaagcttggagtcgccagggacggcgggcggagcctgggcgccggggctaatgggcggagcctccagggacagctggccccgcccaggccgcgcggggcccgctgggagttggagtcccttgcccacctcgccacgtcaccgactgcaaaccttcagctgtctcaggctcgggtgcaatccgtamcctcagtgggttccctttcagtgggttcctttgtccccaggcccattattccgtcctcccctcttccctgatgtattttggcgcggtctcctggctctgcgggcccagggctccggatgaggtctcccgccgtcccgacccccgcaaggggccagcttggtgtcgccttcgttcttctgccaccccattcggtaggggctcccgttcccgccacgccccctgaagttgtggctcgcgcgtcttcccaggactcccccgcgccggagaggcccgcaggaccgccgagcccacactccgctcccgcccgggccccgctcccccgcgccgccttggtacgctccggccacgccccctcggacgcgcttggtacgcgccgggctcccccgctcgcctcagtggttcggccgcggcgaccccactccggcggcgcgtcccccgagcttggtacggctcagcccgtctcccccgaagccgcgcgcccgcgcccgcgcccctcagtcggtggagcccgcagccccccttgtggcccgcggcagctccccgcccgctcggcccgcgcccgccatggtcsgtccgcgccgtgccccgtaccgctccggcgccgggggccccctcgggggtcgcggccgccctccgcggcccctcgtggtgcgcgccgtccgctcgcgctcctggcctgccagcccccgaggcccgcagcctccgcggatccgggcccgctcggcccctcccatggtgagccccccgccctttttccagagccttccacggccccgcccccccagcccctatcccgggctcacgcctttgtccgcagcccccgccgctccggggtgtcccctgtggcccgaagggtggtcccgcccggggccgggttcccccgtggagcacccggtggttcgcgccgcgctctcccctttgttgcgcgttcgggccggggtggggggttgggggacgggggcggggcgggctcatattactgctgactccgcggcccgatttaaacgcgggytgggggcggcagacaggcagccggcacgctcgcttgtttttcctattggagagttgctcgctctccgggcaggaaacctggaaatgggggcggkkttgggggacagcggcgagggaggggcccgcgctttgtaccagcgcccccagatgtcgcacccgtgggcgttctcccctggcggccgctccgtgcccgtggagtgcgcacctagaatacgcgcccgcgcccacatgtgggatgctttgatggactgccgtgagcccagaccttaaacgtaaacattcagcttcgcaggtactttgggctgcacacgcttctccggacccaaaagatgcacatgcttttcagaaaccgtaaggtttacctggggctgtaaaaccgcacatcgcgactttgcaccgtgcacacgcttgccccgatgtgagatttcccctgggttcgcgctcgggtccgcttcttaaatacactgcctcagcggtgtggatggcacagagctgtggcagccctactgaaaccttaaacaggcttcctggggtcataaacatggataccgagacttagatcacctcccacaacttaaacgtaccccttcactccactgccttcgccccttcctgcagcattcgcatctagttgttcaaaagtgctttccgggtcctcagacatgcaccccaaggttttaaacctcagtgcaagtactagatgggcttccctgtgcaatagggatgtcaggcgcgcagttttgcacacgattgccaagatgtgagatttactttaggttgcaccttaaccgtcgtttttaaatatgatcgtcccatcttgatgtgctgctcctgctgtggaaggtatccctgggttttaggcaagcatatgtgttctttactatggctccaratcccagcatatttgaagtcctgagtcaacctgctctcctagacaagcagacattaagtatgtcgcttgggctcttaagtgcgttctcctgacttttacccatctttgtggcagtaaatgcatacgtgtcactgtatatgcggactagatacctcaggtcccagcgccataaacaacttgtatgttgtaagtgtaccctcatctcgaaagtcacctccagctgtgcgttttaactcatctcagatgctggatgtccggtrtggtgcctgaagcccccggggcaacatccactctctgtccaactcattctaacgccaagatactcaggttttctatctgatcttctgacgactgcccaaaagtcagaatcacctgcgtgggtgaagaatcacctgcgtgggtggagaatcacctgcgtgggtggagagcaagtttgttcaggtttttctctttttaagcactcacaaaataaaattttttgtgtttgctagtattctggaaggaaagatctccttgtgcttcatagaaaatttggaaaatacctgtttgtaataagataaaaataaatcacccttataatttgttttcccccgcctggaggcgcctattacggggaaactctcgtgggtttcctgctgccaggctgtttgcggagctttcccttgtttgctttgagatgtttttggttttaaaaaacaataagtgaggtcaggcttggtggccctcgtctgtaatcccagcactttgggaggccgaggcgggcggatcacttgaggtcaggagttcgagaccagtctggccaacatggtgaaaccccatctctactaaaaaaaaaaaaaaaaaaaaaattagccgggcatgatggcgcggcttgcagtgagcgaggttgcagtgagctgagatcgcaccactgcactccagtctgggaaatgagtgaaactctgtctcaaaaaaaaaatagtaataaaaatagtggggagagtgcctgtgagtagcatttgtggcgttgcttggctttattgctagaactttctcttggtgttctacatgttttggtctgtgagacccctctgggggtggtgtcccagctgtcttccaaatgtttcccccttttcctcgctgtctttctcctggatggtttagtcccctctgtgtttcttgtcatctccttcctgcctccccccggggtcagacttataaggccagagaggtgggcactggcctgagccagaggaaggaattgaactttgggatgacagggagcyttaggagagtttcagcctgggaaagacagggcaagctggtgtgtgggacagacacagcgcaagccggcttgtgcctgtggaggctgcaaggaagccctgggcccagcctggggcacggggaaagccccctacagctggcttctaacttgggtctcaagaatcgatcaggcgcacagctggggcaaaggctggaggtggggctggctgaaggcttcaggactctgctgggccagtgtcaaggtgacagcaggctctgggaaggaagggtcctgagggtgggcagcgggaaaggacatgaggaccagcgtgtgggggtcctgaggggtgagcagagggtttggacatggccccgtgggcttccagcaggggatttggggctgaatattgggacgtcccctctggggtgtgtggggactgcctgtccttgcaggccccggcctcagttttcccacctatcccccactccattgcaggaaggtgctcgggtcttcggggcactgggtcccatcggtccctcctcacctgggctcaccctcgggggtctggccgtgagcgagcaccggctcagcaacaagctgctggcttggagcggcgtcctcgagtggcaggaggtgagtctctgtggggctgcggctggcctccagggtcttgtcttrtccctgcggggacaggccagggcatctaggctgtgcacagtgacgcccctcctgcccccacagaagcgcagaccctactctgactccactgcaaagctgaagcggaccctgccctgccaagcctacgtgaaccaaggcgagaacctgtgagtgcyggggcgtggcagccagggcggtggcaggggcagtggctgtggccgtggggatcagggcagccctttctgaccagctccttcccatagggagaccgaccagtggccgcagaagctgatcatgcagctgatccckcagcagctgctggtgagacccgcccctcccaccccayccactctgagcamccccatgcctggctgacccagctgtctgtcctgtcgcccccagaccaccctgggccccctgttccggaactcccagttggcacagttccacttcaccaacagagactgcgactcgctcaaggggctctgccgcatcatgggcaacggcttcgtgagtggggcgggctcccttgtagcactgtggtgacaagtacagctggaggcagcgctctgctcacacagtccaggcgggggtcggggggtctcccctggggccgagggtagccctcgtggcctctcggaccccatctggaaatgactgactccaggcaccctccgtagagcacagggtgaaggaactcagcctgagaggcctccagtttctgcatctgtgcccagcttcgaggtggccctgggggcgtgagtgcagggagggactggggccagccctgttggggcccaggagcctgtcggggacacatagcgtatggcagggacctggtaaatgggtgtgctaggcacaagagccagccaggagggagtggcacgttggggcttggtattctggtctgtaaaatgggctaacctccccgagtggcctgagctggccgtgagggagcagagctgagggtgctgaagcaggcgcggtgagtaggtcctcaggcctggctycaaggggacccaggtatccagccagtggctgtgcagggactgagtggggcaggcgcggccatgacctggacccggggggctgccaagggatctgagagcggcttccgcagcactccagggttgggctggttgaggggtagagatgacattttctgaggtagggaggacaggggagccgtgcttcctagggccaccgggaggctggagggagggaatttgtgtaaagcgcttgagatggtgactttagtacctagtgagtgctgggtgaacccagctggtgaggctgttcaggtgactgagattctggcgcagggcaggtcagaaagggggcttgggctgtgaaagatggcaggtgctggagaggaggcaggggtggggtgggagcgagttgtctgcccagaggacctggctctgggacattcccagtccctgttccctgttgggacagtctgcctctacccgtcccagctgccgttgagcgccctgggttccgctagggcctcccttctccctcaggagaccaggggcagaccagggcttgtgcctggcwtgaggtctcttaagtgaccygttcccccttcacccagcaccgtttgttgagggcctgccatatctgggccccgagtacccagtctgtagggaaagtggacatccatactcaccccccaggcatggccctgggaggctgactgtgcatggctccagggaggccagggacagggccctgagcgggtgatccctgggctggacaccaaggttgagaagttaggccggcagcgtggaggggacagcactgtgggggtggcccggtgtggggaggggacatggggttttgggacggtcacaccacttcatctagacaccacagccaggcacatctgtcaggcttagttctcccatgcgccatcctcaagaggcaccagcactttatctgttgagcctttatgtggcaccaactgtgtgcactattacccggttttacagatgatggaggcccagaagcaggaggtggctggtgttaggtcacacagctaggaggcagcagaacggtggggcgctgcctgtgctcttaacccccaggccaagtcaccccatcaggcagtcaggagggctggcggcagggggtgatgtgggtgggaggtagtgccttcttggcattctcaccgcagcctgggtgccgggtgccactctgacctcagccatggcagggtmgggggatgccgatgggcgctgcacgggctctcagaggcccctcacctatggccatggccttgactgtgggggcctctgtccaccgatgatctcccttcatcccctacaggtggggyggtccagggtggtgggggcacagtggccccgggcagtgaccacagggtcctgacccgcggcccccrcaggcgggctgcatgctgttcccccacatctccccctgtgaggtgcgcgtgctcatgctcctgtactcgtccaagaagaagatcttcatgggcctcatcccctacgaccagagcggcttcgtcagtgccatccggcaggtcatcaccacccgcaagcaggtgtgccagccaagcacagcccctctggggacagagggggattagaccccactgccctggttgggcagccagacttggtgtgggcggagtgtgatgcgatggctggagcaaggagctgcaggggagcccggaggatgccgggckggttcccaccagggctccatggaaaagcggccactgggcggctctgcagggctggagggtgggtcttggcgcggcggcagggaagccagcggagcggggagctgggcaggggttgggatcgtcctgcggctggaaggccctgcctggtaaccacgtgtcctggtcatgccttgccagttgaggcagactctgcaggtcctgtgcaccaggtgagggccgggacctgtctcaggccactggggagccatggggggctgtgagcagatgaggggcagggcctgttcccctgggrctagagaatggacccagctggggctaacaggccaaggctcggagggagggatggcaggccccaggacagacagacaggtttcccaggagcctgggcccctcttcccaccccgttcccttccaacaggcagtgggacctggtggtgtcaactcaggcccagtccagrtcgtcaacaacaagtttctggcatggagtggtgtcatggagtggcaggaggtgagcactcggcagcccrgggacttgggacccccagatcctcacggactgtggctgggaggggacactggcattgggggtctccagccctgagggctcctctttgcctctcccccaaaagcccaggcctgagcccaacagtcggtccaagaggtggctgccatcccacgtctacgtgaaccagggggagatcctgtgagtgctgggctggggggtggaggcagcatccaggggagctggggcttcctgaccctcgtccctttgtgccccacaggaggaccgagcaktggccaaggaagctgtacatgcagctyatcccgcagcagctgctggtgaggggctggggccgggtgctggagcctgcacgcagtagctcttccagagggcggggctgggggcaagagcgcctccccaggtggcctgagctggctgtgagggagcggagctgagggtgctgaagcaggtgtggtgggtagctcctcaggcttggcttcaaggggtcccaggcagccagctggtggctgtgcagggactgagcggggcaggggcagccacgacctgcacctggggggctgccaagggatctgagagcggcttccacagcactccagggttgggctggttgagcggtggagatgacgtttcctgaggtagggaggacaggggagtctcagtttggtcctgggcccgggggactcagcgggctggragccgggaggccgtggtgggagaagccagagctgggggtcccctcgcttccccgcagaccaccctagtgccgctgttccggaactcgcgcctggtccagttccacttyaccaaggacctggagacrctgaagagcctgtgccggatcatggacaatggyttcgtgagtggtgccagcagacgcaggggaggggccggccagggcagagcgagcccggaccgctcacgggggcggacatgggagaggaacagagcaccatgtcccagaccagctggggagagagggtggctagtgtgggcgtgacttctgggggctctgtgctgtccccacggcactggatggggcactgaccctggttctgcrggggcctgctsctcctctgccacatcagggctgactcagcaccaactccgcgctctccactcctcagggacaggcgcccttgtcactccwggtttcccgggagcttgtgccacatcccaaaggcccattgctgggcagggagggctgtctgcccccagcaaggtcccagaatatttggcgattgtcttatctgggggaggctcagctgactcctcttctctctctcgggctcagtttctccatctgtgaggtggagaaggttggactttggtgtttctgagccctccccccgatgtccaccttccagctgggccatacttgggtaatatcccgaaactaccttaaaattaccttcgactcagtctgagtaaactgtccacgaagctgttcgtgggtggggggggcctgggtgtaggtgcttttacatgaaagcaatttcaagcattccctcaggggccgggtgcggtggctcacgcctgcaatcccagcactttgggaggccgaggcgggtggatcacctgaggtcaggagtttgagaccagcctggccaacatggtgaaaccccgtctctactaaaaatacaaaaattagccaggcatgatggccactcaggaggctgagtcacaagaatggcttgaacccgggaggcagaggttgcagtgagctgagatcatgccattgtactccagcctgggcgacaagagcgaaactcagtctcaaaaaaaaaaaaaaagtttcctcaaggaaacccagaaaggctccatgtacctcagcccttgcttgtgctgggccggccgctgcagatccctcgggctcctgagttgaagccatggccggttggctcaggtggctgtggtgaggtggccccagacacagcctggcctgcccaggagctctgaaatgcaggttcttgggcccttcccgacagagcctgttggcctttggcccacccattgctcttggccaccgtgtcatcccaataagggggcccacctccagggtgggtggggggtgtgaggacagagcagttaggctgtgcctggctcatggagcccacggcatgrtgccgtggttggagggatgctggtccctgtggtgctgtctggtgacaccacgccctgtgcctgccaggccggctgcgtgcacttttcctacaaagcatcgtgtgagatccgcgtgcttatgctcctgtactcttcagagaagaaaatcttcattggcctcatcccccatgaccagggcaactttgtcaacggcatccggcgtgtcattgccaaccagcagcaggtcctgcagcggaacctggagcaggagcaacagcaacgaggggtgaggtggccggcctccagggctgctcagtctccctccacccccgctgcctgctcaccactggcctctgatttctcgccgtagatgggggggtagtggttaccccgggctgggcccctccaggagtcacagatgaggcccccgcagagactggtgagtggtgaccctgtcatgtacaggagggaccctggggcatgtggggggggtggggttgggaaagaagcagggcgaccttggccttggggagagcagagcagagggagaggcagcagtcccagcggtcctaggctgtcgggaaactgcagcccagcctcagggccatgggaggtggtatccaggcctgggtggggccaggcctctgctcacagggatgtggggtcagtgcttgggagcctgtggccagcagcccccactgcacccctgcccccaggtgacaygcttytgagcaggggcccctggggacttcaactgcccagcaacatggaggatggtgtcctgaggcctccaaggacggtccccacccctytacgtttccccaataaagccttttaaaaaccwgcctgccttctctgctcactgcccgatgccttgcagccccctagctctaaggtggcccagcaggctggacagcccgggaactcactgggtctggctctcggctgtccacaccctcttcccccccgaatctccagacccgcaggccttgggttcaagttcagtgtcacagaacctgagctggattttgtcctcaggggtcacacctggccttgagccagcccctcggttgaggctcgtgggctcaccagctggctctcggggggccacacagcgccctccctgtgtgttccccggctaatgtctaaagtgctcatgccaggtcccagctggactcccctcggtagggccccaccttttgttacctgaaaatgtccttaaagcctcctccatgtaagaaactggcaggcctggagcccctcccccgtggggaccaccctccttccagcaaaatgccggccaagctcaaggagaaacagcgtttattgtggaggggagctgggcggggctcagccctcggagaactggcagtacagccgccccagcctcggctccacccatagccggaacgggatctccaggatggcagagaagccttcagccagcgttggggcctcgaactgcttcctggcagtggtgggaacagtgagggacagcctggatcatgtggcccagccagtgcccctgccccctgctatccccaacagtacctgtagccatacatgaccatgtctgacacggggatatgagaggagtccgtcatctctcgaaactgtggggaacatcagaggggcggcaggcccaggggtcaggggaggaggggggtcagggggtgcagcccggggggtgtccgggctgagcgggctcacccggttgttgtggcgcgcctgctccagagtggcggtgaagaggaagcagcggcaggggacgcccgcggctcgggcacactggacgtacctgtgggggaaggagctggatgtgcaggccccgcccaccccgccgcaggccacctacggccccgcggtcacgctacctggcgcggctcgcggcgtctgggtttgtgttgtcgatggcgacccgtttcccttgcttcagggctgtctcacacgtggtcacacagcgctgccaggagcctagcgtgtcctggggacacgagaggtcacaaacagatcggcagacccagggggagagaagaccccgagcggggacggggaggcaatgatggaggaaagccgccccaaaccagttgagaggtggagatgggaactttataatagatttggggcggcaaaagcctggtcataccctgttcacgtggacatatccggccgacacgaggtgcttcttgagaaaggtggacttcccggctgtgtggggggcagtgtcggtgggtggcctaggacccaggcggggctcagggcacgcgcacaggaacaggacacttacccccagggaatcccactgcgacaaccacctccgggctggcgctcaggagggccctggactcggggaggcagagaggccctgagcgggagacagtcctctgcgaggggcgggggacacgcgtgagatgccgtccccatccccgggagccctcccatccccacccccacccccgccccagggcctcaccggatcaaaggctgggagctcgaagccggctgctggccacttgagaaagaactcctcaggcgtggcgaagggcaggccaaggttgagggcaaactaggggttgaggacgaacatcagacacaggccagggtcgggctcgggcgcggggcagggggcaggggcctcaccaggcgatcggcgcaggagaagtctttcttcttccgccccggggcccagttggccgggcgtccggctgcgtctggaacacacgggacaccccgttcccaccagctcggagggaggcgtcccagcccaccctcagcagcctccaggcccttacctcccacaaagatgctgtccccgatggatatgggcgtgccgtcgttggcctacgggagacggtagtgaggaggcccttcccacaaatgtccccccgcagcggtagcgggtccctggggctgcttcgcctggtctgtgccccacatcaggaatcatcccccgacctttcatgtcctcactctccagccactttgcaccgtgctcctggccccctcccccctccgtggtctctccacacagccccctccctccaggtctcccgacttcacctcctcccgttccccacgcggccaccggagggcacccaccctgctacagctccagcctccggcgtgccggcgcctcccaggttccccctccctcagggcaaaagcggggccctccctgtggccctgccctctcccctccctcgcttagagccagccgcatgggcctcgctgtccctaactagcccaggctagggactgcctcagggcctttgcacttgctgtcactcccacaaggggggggaccgctttccccaggtgtccacctggctccctcctttccctgccttaggccttttcctctgatgtcacctcctcagaggccatccctgcccaccacgggtgatgcctgctttctccagctccctccctcctgctgttttacacgccagtctgcccatccgcctagagtcaccgccctcgccgtgagggccctgctggagcaggccgtcccgctcactgataccttcagctcaagaatgcgctaaacttcagaacaaatgcacacacaaacgaatgaacgaaggaatgaacagcttccctactactctgatgtagaaagtctgaaagcactggtctcgtaaaccaacatctaagatgtcacagcaaaaaacagaaggagggagcgagagaggacagaggagtaaggaggccccaaccggaggccggggagcccaggagtgaggggctggagtgaggaaaaggaggggggccgggcaggctgcaagactcacctgctcctgcagatggtcccacatgcccgtcaccggcttccggtacaagcctgcgtgcgtggccaccagcacctgtggatgggagggggccaccagctttagctccccctcaagcacctactggatgccaccccagcccagaatttgtagctgatgatgggttcctatcagcatcacactgcctgaggcctccgccccgcttaccctggagtctaaagccctcgctctggatctctgtgcccccacatagctcccagcctcccttccagccatacctggaaggggacccccagcttctccaccacagcctccaccttggccttgaactcctcggctggcagcttcccgcgcccgatgctcatctggttggtgaagatcaccagctggggagcaaagggtgtcaccagacgctctgctcaccagggccttggtctgactgcggtcggaccgccacgtgcacgtgcccatgcagacaggcggctgcacataccttgtagccctcggcttccagctctcggagcttacggggaatctctgggtacaagatcctacggcaggtatgaagcggcaggggtgacccggggccagaggtggactccaggcctcactcactcccttgttttgcctcttatcacctccagtcactggggccagtgggaaagaccttcccagagcgtgtggtgatgagcgtcccgtccagatcaaagccagccacctggtgtcaccaaggaaagacaaacagcagcactgtgatacctctgaccctcctcactcacaggctgactcacaccaaccctgccaggcagggtgttatcactgccatctcacagatggggaaaccgagtcacagagcacctccatctcaagcatccgtgatgcctctgagtggggcccgacatcttaaccttactgtctcctgttactccttatgacgccagccccaggattacagtctttaaaatgggggttaatgtcttacccagcctccttcttcccctggccttcaccacctcggtgggctaataaccgtgaaaataaaagcaggagcaaagctttgggtgctaactgcatgtcaggaactatgccacgtgctttttttatggattcagcatcgtagagatgagacacatgggactcagaatgtggtggtaacagcatttgaactcaagtctctctggacataaaaaatcctcatcgtaatagctcctactgagacagtcatggtcattgctgattactgggtggtcactgtgggtaacgcaggagctgacatatatcattctccccactgcttaactgcttacaacgatccctgcatttatcattaggcccatttctcagaaaagtaagtagaggctaaaaagttgagagcacgcaacaaacgtgggattgggtcccagtctgtggcggctcccacagccctcggcgtggccctcaccttgccctggggtttcaccccagctgcggtgaacactagcaacttctccaagttctcccagccggggtttgacttccgcatacgcttcttcggcagctcagcatctctcttctcatcttgggacaccagaggggtgccaggcggagtatctggctgggattctggtgtgcgggtctcttcccagcgcagggtcagtgggtggaggccattgaccaaatacagtgtgtcccccacccccagagagccctccaaccccggcttcaactcctgggtcccggtagttgaggggttaactcccagctgcagaaagagagggaggagctgggactggctccgcccccaccgggagcttcctccaatcaaatacccagcggaaaaatcagcccttctccaccactatcagacccttaggccccacctcttcactttggaacgggctttggaacggttacaggttttcagccttgtccgaatcttttttttttttttttttttttccctggagatataggcttgttttgtcgcccaggctggagtgcagtggtgcaatcttggctcattgaaacctgtgcctcctgggttcaaacgattctcctgcctcagctacccgagtagctgggattacaggcacccgccaccatgccccgctaatttttgtatttttagtagagatggggtttcgccatgttggccaggctggtcacaaactcctgatctcgggtgatccgcccgcctagcctcccaaagtgctgggattacaggcgtgagccaccgcgcctggccgccttgtccaatttctaaggtcttggacaggtacccaccccactgaaacaggcaacacttctttctttactggacacatccccttctctcccagccatattttttcttttctttttttgagacaggttctcgctctgtcacccaggctgaagtacagtgtggtgatcactgctcactacacccttgacctactgggctcaagggatcctcccgcttcagcctcccgattaggaactacaaggacgcgccaccattcccgctaattttttagagagacaggtttcaccatgtcgctcaggctggtctcgaactcctgggttcaagcgatccgcccgcctcggcctcccaaagtgctgggattacaggcttgagccaccacgcccggccccaatcagattttcctaatgtaccccttcactgacggcttgcaattcctccccaaatcccatccccaggccttgctggcccttgcagaggcactgatacctgtttcactgccactgtccgggtctcaggatctgcgaccagctccactgaggattggaggggtggagtcaggatttgcatccttgtgtgattgggtccctcatttctggggagtgtggcctgcttcaggctatagcatccagggagtaagaggcagtttatttctacatgggattggctccttgacatgcagtagccagatagtggcactaggattgcctgacactggtccttgcaagggacagggaggtacttttctctacagaattggtttcctccttgacaaaaaatgtggctagatataggtccggggcttggcctgttaccatccatcccaacctagcgacatt

SEQ ID NO: 97450 - DNA, 34745 bp, Homo sapiens
ctttggggcccagaatgttggcctgaggtctcagagcctgatctgccagccagaggtggtgctagaggcccaggaaagacacttcgtcctttaaatatctttgtgagcgctgctgtgtgagaaccatgcttggcacttggcttctggcggaggaaacacccaaagctggcagctaaagcccacagcccatgcacggaaaggcaggaccccagggcgatgagcggatgcacatgcacgcgggccactgcagaagagcacggggccaggctgggctccgagatgtgcctgaggtcccagctactcgggaggatcacttgggcctgggagttcaaggctgcagtgagctgtgatcacatcactgcactccagctttggtgacaatgttttgttttgttttttccttttgtttttttttacttctgagaccctgtttaaaaaaaaaaaatacggcgatgagtatttgttgagctgggatgtgtgagccgggtgaagctgggtggctgaccgggggatcctgtcggggaggagtaagttgttgagtgggggaggagaggagactacaggggcagggaccccactcgggccaccctcctgagagccaggggaactggcgcagggtttaggttggcatttgtgttgccgtttgaagccatcatgttgttggacttgtcaaggggttggggagacagtggagtggggcgcctgcattctaggaggtctggacagagttagggtggcactgccaggtttgggtgttggagaggagggagcaaggaatctgggctcaaacccacatggtttattgggagccggataggcaggatgcagagtgaaggaggagccgaggctgggtgccagtgagggagggctagcaggaaggggacagcgaggtcacaggccctctgggagcttaagggagggaggaggggatgaagcgaggtggggacgcatcccggagctcgccctctcatgtcctgcaggaggtggacatctataccgtcaaggtggaagacctgaccttcacctccccgttctgcctgcaagtgaagcggaatgactacgtgcacgccctggtggcctacttcaacatcgagttcacacgctgccacaagaggaccggcttctccaccagtgaggcggggcccacagggctgggggccgttcccgagccagggcggaggcgcacccacgtagtggagggggtgacagaaacgggcagaaggaaccatggggacacgcgtgttccagtgtgagctctgccatgtagcagtcacgtggccttgggcaagtgacctgagtgtgcagtgcctcagtttcctcatccacaaaaggctgacacggtccctgtctccaaagctcaatgacagggaggtgactcgcggatagcagtcccatcagctgtcatgggggtgggcattccgacagagggaacgcaagggtggggttggggggggcagcaggccgaggccggctgacccgcccgcgcccccaggccccgagtccccgtacacgcactggaagcagacggtgttctacatggaggactacctgaccgtgaagacgggcgaggagatcttcggcaccatcggcatgcggcccaacgccaagaacaacgtgaggctccgggcagctgggtgggagggtggcagctagggcggggagtgtagattggggggggagtggtgggggaggaatggtggcagcgggggtaggggatgggggcagccggggtgggggatgggggcagctggcgggggcgagcacctctgcctattcccgggtccccaagcccctcagccccatgcctgtctacacagcaggattgcttgagcattcaccggaagttatgggcctggggacccaggctgaaaccctgccctcctggtgcttccactctagacaagggggtcagtgacatggtgatgccagttggaggtgacctctgtcaggctgggagcagggcagacaggtgttggtgtaggtgggctccagggcaagaggcagcccccagtagagtgcacggggttttctagcccagctgggaggcatgagaggagaaaggcagctttttgttttctgctcccctttctttttcctcctgagcacttggcaggagctgccatcacctgagatcagggggcttccgggggagctgggggggcttctcggagacagggtctgggcagagatccagtgtggtgggtctgagcaggcaggaggatggaaggcttggagcctggagtcgccgggagtggtctgggttggaaaagtgggtcccggccgatgggtgcgagggtgggtggcactcagggtagtcatggaatgtggaccctgggacacccacgagcctgtgacagcagcagttgtcaactgggcagttttactgccccctccgctccccgcccccccccaggacgtttgccaccgtctgtggaaacatttgtggttgtcactccggagaaggggtggtcctggcatctggtaggtaggggccagggggctggtaaatgtcctgcagccacaggaccaccccctacaaagactcatgcagcccccgggaccacggcactagctgggaaacggatactggagagggaggaggagtcctcgggcgttggtgactttgtctcatcttcatgtgctggagggtatggggggaggagaggaagtggagacagcaggctggaccattgtgtttcactggaacgtttgcctgaggaggaagtgggcttgggagaggttttcttttttatgaaagaagcaatcactgcattgctgatgggaatcatcctgatggagaaatccaagggcaagggacagcagctgggctctactcctgagtgagtctagtgggcttgggggtgtccatgtggtgctgtcccttggcagggtcagggcagctgctagggtgggaccagcagttggggtctgcagcgtggagatgggcaggaagctggagcccggctcatcgtcgcatagcctgcctgcacccgccccccgccaccacctcctggtgggttccgccctcatgccccacctctccctgcagcgggacctggacttcaccatcgacctggacttcaagggccagctgtgcgagctgtcctgctccaccgactaccggatgcgctgaggcccggctctcccgccctgcacgagcccaggggctgagcgttcctaggcggtttcggggctcccccttcctctccctccctcccgcagaagggggttttaggggcctgggctggggggatggggagggcacatcgtgactgtgtttttcataacttatgtttttatatggttgcatttacgccaataaatcctcagctggggtctggctttgtttcctgggggcaaaggaggtttggggttcctttcgcaggtactgcagtgccagcctcagcagtggggggaccggccttggcacctgctggtggctgccattctgtggatctgcgtctcccgtcccccgtctctaggcctcttgctccccttccttggttccttctcggggtccctgtcctccacagctgtctctcagggtctttgtccaactcttttcatccctctcctgggtctgcgcccctcccctctgcggtacccgtgtcctgcctagtaggggatgggggtggctttccagcacagccagccctcaagtttcccagaacagtctccccacctccccccaacactcgacattgttcctctctggctgttttttcctgttcgggtcccttcaaggcccaactgtgcccagccctctgcagctggggacactgagtgggttgggggtgtatgtttgcaaggatagaatttctcatgggggagtggccctgcttcctcccctagaatggcttggggcttagggctggggacttgccctccatggaggtcagtgggagttgcagctgtaaggtggcagggcctacccatcttacagaggtgaagacgaggtccctctgcctctgctgcagacatggcgtctgcacccacccttccaccctcagggcctggccacggggtcctgggtcccccacaatactgtgcactcgacctggttgacccaggacaccctcctcgttgaacagccctggctacacctgcttcagtgcaactggagccctcaccggcgagtgcctgacacctcggccttttctcttccggaggggcgctcctcagtgtgtttggggtctccctcgctccacgccctccagggggccgcatgtgcacttgccctgcattgcctggcccccgaggttccagggtctcaactgtctactaaccggcttcccgacagggtgagggtgaggtcgcatctacaaccagagccagcgcttccccgccgccaccccttttcttggaatcccgctgcttagctacctgcgggtgtcattggccccgccccatttccccacgctttgaagggggcgagtctccacagacctcctagggggatagacagcagctggtgtgaccccacacacccagtgaggtctctggagccgcggtgcgggaagcggggacccgggtttgaatcctgcccctctggtgtggtgcggcctcttcccacagacttttggcctcagtgttccccgcctgggaagtggggactggccctggtacctggctccagagctgcacccagaggcgatcagcccggtgcgggaacggggcggggtggccgcaactacgggccacggatcctgacccgccctgcccacgatgactatccacatcctcatcctgctgttgctcctcgccttctccgcccaaggggacctggacactgcagccaggtgagaaacccgggtggcagcagggacagggcgggagggagaccgtaaagggcgagcgccctctcccggccgcggaacgggcaggtgatctgtaagcctccccgctggtcttggagtgcttgggtgcccacctccatcacgctccatctctcaattcggtttgaacccggttttctcccacgctccctctccaggcgaggccagcaccaggtcccccagcaccgcgggcacgtctgctacctgggcgtatgccggacccaccgcctggcggagatcatatactggattcgctgtctccaccaaggagccctcggggaaggccagccacgagccccaggacccctacagctatgggcgccgccggtggcgcgaggcggaagcccggctcggttcccaggattccggcctgcagcgagggggctagcgcagtgcccagctcgctgggtgacctcgggcacggctcgtcccctcctcggcttcagtttgcctatctgtatgttggagcttctactccacatttcttctcccctaactccagcccctgaaaccgtcttccccagtccctccccgggctgcgactaggttggacctagaagcacacgggaccaggctgggcgaagaacactgacgcccagagccgaataaacaagagttccgtgtttcagtctctgcttctctgtacctatttcgacctctcagtcgaggctgggtctctaatatacctttctctattagccatgctgcttctccctcacggaagtcccactgtctaccttgaatccaacccgctgtggcgcctttcttgccaactcaatccatgcaccttccgtgggtggttttggcgggccgtcctgacccccaaacatccctcctccctccctggcgtgaaagggctgagatttgctccggcaccctacgcgcctgacgttataatgcacctggggtgggctgcgacctcccagctgagccttgttcctcgaagagacaggagactaagagacaatgagctgagtgaggagcccaggaacccgggttccgaacagctgcgtagaatgcgagcggccaaatggtggagaatctggccgggtaaaaggagacggaggactggggatcgaacggatgtaggggattggacgccgtggctcgaagggggcggggatagaacgcggggattggaaggaggcggggataaaacccgggacctgaatacccggctagggacacgagagasaggaatcggggtttctgggtgacggtgatctcggggtgggcaggactccaaaggcccgtcgacccggtggtggactccttgcactgggattggacatatgcaagcgggagatttggggccggcgctcaaaatcggggggcgggggtggactcgggtttggaccccaggatccgatcagcggacccttgattcaacgtggtaagtactggaccccaggggctcgggctccggcggggcctggagtcctgtgtctagggttgggcgtgcaagcctctccatcacttgtcctcgacgctcgcctccgctcacagcctcagcatcccaggctgcgaggcatgcgcagtgggtgcttccttccccattccctccagcacgggcsgggggaggggacgctgagcggatgaatttatagacaccatccccctcgccttggcatgaaaagcggmaatggggtggacagcgtcaatgtctaacaggtgtttgtttcatatgggtctaaaactaatgcttttctcaagaccccgcaactcagcctggaccagtttccctcctccacccacccccgaatcttgagaatcctgtactggggggagggcactgcccccgcaccatgttcttgggagagcaggtaaaggggttaacgcgagctatccctctggcctctctatgcgttcccagaggtcccgaattgacgtccttccctcaaaacctccgggtctacaaaccaggaccctcaagacccttcaggtgcttagagaaggatgagctaggttatgtagtcctgggtcggcgcaaaaaggcagctgaaagcgtgagatcccgggtctgagggaggaggggctggggcctgggcttctgggtctgagggaggaggggctgggggcctggactcctggatctgagagaggaggggctggggcctgggcttctgggtctgagggaggaggggctgggggcctggactcctggatctgagagaggagggactggggcctggactcctgggtatgaaggaggaggaggggctgggggcctggactcctgagtctgagggcggaggggctggggtcctgaagtatgactctgcccgactcagggctccagcgtgacatggctgaagcgcaccaggccgtgggcttccgaccctcgctgacctcggacggggctgaagtggaactcagtgcccctgtgctgcaggagatctacctctctggcctgcgctcctggaaaaggcatctctcacgtttctgggtgaggagcggtgctggtcggtttccttccggggatccaggtttctgcttccgggatgtctgaggctcacttccggcatttcagctggttyatttctgggagactatcacccctttttcykagaattttgatgtctgctcccaggacccctttagcaatttctccgtggctcacttctgggatccacagccccacctgctgagaacctctgctcacttctttcacccaagaggggaactgggccccccaaaaactacccacttccagtttctagaactccatatccttcccttatggtgaaattatcatttcttcctttcatctccagcttcttttgtrgttgttgtttctgagacacagtctcactctgtcgcccaggctggagtgcagtggcgggatctcagctcactgcaacctccgcctcctgggttcaagcaattccctgcctcagcctcccaggtagccgggattattggcgcacgccaccatgcctggcttatttatttatttatttatgagacagagtctcactctgttgcccagactggaatgcagtggggtgatcttggctcactgcaaccacctcccaggttcaagcgattctcctgcctcagcctcccragtagctgggattacaggcatggattatacgcccagctaatttttgtatttttagtagagacggggtttcaacatgttggccaggctaatctcgatctcctgacctcaagtgatctgcctcccaaagcgcttgggttacaggaatgagccaccgcgcccggcccaaactcytgctctgtycctgttctggaatgcgcatgcccaatgtgtaaccagcacccatgtctgtcccagggtttctggttctagaactcttgcactgtctccatacagggactccctgcttgtcacatcctctgtgtgtgaactggggtctggaacacctgtggggtcatgattgagtttgaatcctgactccaccgcttagtagctgtgtcatcttgggcaagcacctctcttggagtcgcagtttcccctcgtggaaaacatgggtgttgacagcacctccctcacaggatagccttgaagactaaattaattcttctatgtcctggcccatggcgaggtctgagtgttagcttctgatattgttcttcattcattcaccatatatttatggggcatccggtaagggcctggccctctttagcatggagaacacagcagatatcaacagacagaatcacgcctgggcactgcgggctcacggctttaatcccagcactttgggaggctgaggcaggaggatcacttgagcccaggacttggacaccagcctgggcaacatagggagaccccatctctattaaaaaaataaagacaggtcgggcacggtggctcatgcctgtaatcccaacactttgggaggctgagacggacggatcatgaggtcaggagatcgagacccttctggctaacacggtgaaaccccgtttctactaaaaatacacacacacacaaattagcctggtgtggtagtgggtgcctgtagttccaattactcaggaggctgaggcaggagaatggcgtgaatccgggaggcggagcttgcagtgagccaagatggcgccactgcactccagcctgggcgacagagcgagactccgtctcaaaaaaaaataaaataaaataaawaaataaataaataaataaataaataaataaataataaagacagaatcctgcttttatrgagttctcattcgagttgggggagaaggcaataaaacagatgagcaaaacagaaggcaataaaacagatgagcaaaatatagggtatggtgacattctatagtgtcatctgatattgatggtgacacatgctatggtgaatgataaatcgggtagagaagagtgatgtgggggtgttgcagttaaataagggggtggcaggccaggtgcggtggctcacgcctgtaatcccagcactttgggaagccaaggcagacagatcacgaagtcaggagttcaagaccagcctggccaatatagtgaaaccccatctctactaaaaatacaaaaattagccgggtgtggtggcaggcacctgtaatcacagctacctgggaggctgaggcagaagaatcacttgaatccaggaggcagagattgcagtgagccaagattgcgccactgcactccagcctgggtgacagagcaagactccgtttcaaaaaaaaaaaaaaaaaagggggtgggagccggcggccaggaggatctcctgaagctgggatgcttcagcaggctaaactgaacctctgtggtcttgttggttgtataatctgttccagttggcaaacagccactgccttgaactccgaatccctctcccgcccttaccctgggactccttgggcctcaggccagtctaccaactaaagtgttaacatgtgaccatccttggccaggcatggtggctcacgcctctaatcccagcactttgggaggccgaggcgggcagatcacgaggtcaggagatcaagaccatcctagctaacacagtgaaactccgtctctactaaacatacaaaaaaattagctgggcgtggtggcagtcacctgtagtcccagctacttgggaggctgaggcaggagaatggcgtgaacccaggaggcggagcttgcagtgagccgagatcgtgccactgcactccagcctgggcaacaaagcgagactccgtctcaaaaaaaaacaaacatgtggccatccttttcgtgtgtttaaatacatacatacatagatacatacatatttatagacctataaatatatacatgcacacacatatatatgataacattacatggagaaaaatgcacaattttttttttttttttttttttgagacggagttttgttcttgttgcccaggctggattgcaatggcatgatcttggctcactccaatttccgcctcatgggttcaagctattctccttcctcagcttcccaagtagctgagattacaggtgcctgccaccaggcccggctaattttttgtatttttagtatagacagggtttcaccatgttggccaggatgatctcgaactcctgatctcaggtgatccacccgccttggcctctcagagtgctgggactacaggcatgatccactgcacctggcctttttttttttttttttttgacatggagtcagtctgttgccaggctggagtgcagtggcgtgatctcgacttactgcaacctctgcctcctgggttcaagtgattctcctgcctcagcctccaagtagctaggactacaggcgtgtgccaccacgccaagctaattttgtatttttagtagagacggggtttcaccatgttggccaggatggtctcgatctcttgacctcgtgatccgcccaccttggcctcccaaagcactgggattacacgcataagccattgcccctggccttttttttgagacagcgtctcactctgttgctgttgcccaggctggagtgcaatagcaggatcttggctcactgcaacctccatctcctgggtttaagcaatttttctgccttagcctcctgagtagctgggattataggttcccaccaccacgcctggctaatttttgtatttttagtagagatggggttttgccatgttggccaggctggtctggaatgcctgacctcaggtgatccacccgcctaggcctcccaaagtgctgggattacaggcatgagctactgcgcccggccaaaccccagtgttttcatttgtaaaatgagatcatcttagtacttatttcacatggtttggggaggatttaaattgttaatccttgtaaatggcacctggaatgtagtaagtgctcattaaacgttagttatctctctgaggcttccaaaggagtttagttagtaacgcagtgctgttggtcrttcctcattcattccatgccctggtacttctagaaggccttactgagctccagaccctgctctgaatagggatcatttttctttttcttttcttttcttttttttttttttttgagacagggtcttacttactttgttacccaggctggagtgcagtgtcaccatcacagctcacttcatccctgaactcctgggctcaagcgatcctcctgcttcagccttccaagtagctgggactaaggtgtgtgccactgcgcctaatttttctttctttctttttttttttttggagaccttgtcttgctctgtcacccaggctggagtgcagtagcgtgatcttcgatcactgcaacctcagcctcccgggctccagcgattctcgtgcctcagtctcccaagtagttgggattacaggtgcctgccaccatgcccggctaatttttgtatttttactagagacggatttcaccatgttggccaggccagtctygaactcctggcctcaagtgatccgcctgcctcagcctcccaaagtgttgggattacaggcgtgagccaccgctggtcttgaactcctgggctcaagggattctcctccttgacctcccaaagtgctgagtttacaggagtgagccaccacatccggactgttctgcctttgacagcctccccttccaggtcctgcctcagaatatcctcctccagggagccctccctgatgccctcgaactgtaacttggcagcacagggctcctcctatttcttgccctatagcaattaatacttacttcattctggtctgacctcgctgagggcaggacctggatctctctgttccctactagatcttgagcctccagctcagggctccgcactgggtgctcagtaatgtctggggatggcacagaacaggggctcagaggagagggcagatgattcaatggatgccctttcctccccacagaatgactttctcaccggtgtgtttcctgccagccccctcagttggcttttcctcttcagtgccatccagcttgcctggttcctccagctggatccttccttaggactgatggagaagatcaaagagttgctgcctgactggtgaggtccccccactccagcccagtaacccccaatcactctcccttcacccagtaagttcctctgtcattgtggtgtacctgctaaagaaaagtaacctctgagacttacattgggtcagattaataaaggcatggcatgaagaaaaaggaggtgaggccgggcacagtggctcacccctgtaatcccagcacattgggcattgggaggctgaggtgggtgtatcgcttgaggtcaggagttcgagaccagcctggccaacatggtgaaaccttgtctctactaaaaatacaaaaattaggccaggcatggtggctcatgcctgtaatcccagcactttggaaggctgaggcacgtggatcaactgagrtcaggagttcaagaccagcctggccaacagggtgaaaccctgtctctactaaaaatacaaaaaattagctgggcgtggtggcaggagcctgtaattccagctactagggaggctgaggcaggagaatcgcttgaacccgggaggtggaggttgcagtgagccgagattgcgccattgcactccagcttgggtgacaagagcgaaactccatctcaaaaaaaaaaaaaaaaaaaaaaggtgtgagctttgctgggcacagtggctcatgcctgtaatcccagcacttttggaggccaaggcaggaggatcacttgagcccaggagtttgagaccaacctaagcaacatggtgaaaccccgtctctactaaaaataacaaaaaattagccaagtgtggtgtcacttacctgtggtcccagctacccaggaggctgaggtggagatcacctgagctcaggaggtcgaggctgcagtgagctgagatcatgccactgcattgcagcctgggcaacagagtgacaccctgtctcaagaaaaaagaaaaatagccaagcatggtggtttacacctgtaatcccagcactttgggaggccgaggtggccagatcacctgaggtcaggagtttgagaccagcctggacaacatagtgaaaccccgtctctactaaaaatacaaaaattagccgggtgtggtggtgcgcgcctgtagtcccagctactcaggaggctaaggcaggataatcacttgaacccrggaggcggaggttgcggtgagtcgaaattgtgccactgcacttcagccttggtgacagagcgagactctgtctcaaaaaaaraaaaaaagtatgagctttgcccgtctctagtcatgtagtcttaggcaaggatctcatcgttgttgattgtcaaggccttcatctgtaaaatgaggtatgaataattgcttcttagtgtgcttggaagaattaatcaaaatcctgcctgtcggcgggatgtggtgactcacacctgtaatcccagcactttgggaggctgaggcgggtggatcacctgaggtcaggagcttgagaccagtctggccaacatggtgaaactctgtctctactaaaaatacaaaaattagccgagtgtggtggcaggtgcttgtaatcccagctacttgggaggctgaggcaggagaattgtttgaacctgggaggcggagcttgcagtgaggcgagatcacgccactgcactccagcctgggcgacagagagagactccgtctcaattaaaagaaaaaaaaatcatgcctgtcatatagtcagtagagtgccaggaggtcctcatgggagtggctgcattatttttattgagttattgtgatcttcaggaagggtctgaaaactgggtgcaggtgagatgtcaggtctagttctcggatgagtcctcccggggaggaaggtccacattttgtgcagatggccccaaagaacagacccaggatcagatgtagacaattccaagacggaggccgggcacagtggctcacacttgtaatcccagcacttcggagggctgaggcaggaggcttgagctcaggagttggagaccagcctgggcaacatagagacccctgtctctaaaaaaaaaaaaaaaaaaaaaaaaaaaaaaaaaattcctggaacgctagatttacccccagtctacagagggaaagtgatttgacccaagtcctccaggtgacatttgcaaactttgcaaacaaacatgttgatttaatgtagctttagaccagcttttcctaaatttaagcttgtattggaatcacctggatgggttgttaaaccgctgactatggccaggtgctgtggctcacacctgttatcccagcactttgggaggcccaagtgggtggatcacctaaggtcaggagttcgagagccgcctggccaatgtggtgaaaccctctctactaaaaatgcaaaaaattagctgggcgtggtggcgggcgcctgcagtcccagctactcgggaggctgaggtaggagaattgcttgaacccaggagatggaggttgcagtgagccgagatagtgccactgcactccagcctgggcgacagagtgaaactccatctcaaaaacaaaacatgccgggcgtggtggctcacgcctgtaatcccagcactttgggatgccaaggcaggcggatcacgaggtcaggagatcaagaccatcatggctaacacggtgaaacctcatctctactaaaaataacaacaaatagccgggcgtggtggtgggcacctgtattcccagctactccggaggctgaggcaggagaatggcgtgaacccaggaggcggagcttgcagtgagccgagatagcaccacagcactccagcctgggcgacagagcgagactccatcccaaaaacaaaacaaaacaaaaaaaacgctgattgctggaccccacccygagagattctggcttgttaggtcttaaaggcrcccaggaatatgcatttcgaacaagctcccaggcagtgctcccaggagccacagtttcagaactattgccttagagtagtgatagctggaaggaaaaastgtcccctcaatagaaataatggctgtcatttattaaacacctaccaacttccatggaaagtgactttggaagcttggtgctgccacaatgggagggggctggagggggtgacagagctcacacctactaaaatgacaaaaatgggtttctctgtctgacagccaaaagatcagcgcaggggctggagggggctggaagggagggaggttctgaggccaggagacccaggcccagcctctgtttctctccccgcaggggtggacaacaccacgggctccggggggtcctggcagccgcgctgtttgcctcgtgtttgtggggagccctgatcttcacactgcacgtggccctgaggctgcttctgtcctaccacggctggcttcttgagccccacggagccatgtcctcccccaccaagacctggctggtatgggaggggcatagccctgctcaggctctcctgggacccgcttatctattcccctctctctgggtctctgtccccctctctctgggtctctgtccctctctctctgggtctcttccccctctctttctgggtctctgtcctcctctgtccctgggtctctgtccccctctctctgggtctctgtccccctctctctgggtctcttccccctctctttctgggtctctgtcctcctctgtccctgggtctctgtccccctctctctgggtctctgtccccctctctctctgggtctctgtccccccctctgggtctctacccccgactctctctgggtctctgcccccctctctctctgggtctctgtccccctctctctgggtctctgccccctctctctctgsgtctctgtccccctctctctgggtctctgtcccctgtctctgggtctctgttccyttctctcttggggtctccgatgctcttaagtctctgtgtccttctctttgggtttctgtcccactgtcgacccctgccccgtcaactccctggctccggtgaggggttaatgacccggtaactcctcctccccaggccctggtccgcatcttctctggccgccacccgatgctgttcagttaccagcgctccctgccacgccagcccgtgccctctgtgcaggacaccgtgcgcaaggtgggcctgggagcgcgcagacgggctggggcggccggggcgggccgggggcgtgacctgccctcttctcccctttagtacctggagtcggtccggcccatcctctccgacgaggacttcgactggaccgcggtcctggcgcaggaattcctgaggctgcaggcgtcgctgctgcagtggtacctgcggctcaagtcctggtgggcgtccaattatgtgagtcccgccaccgccaccaacgccccacctgaagggctaaggttgtgagctcgcctgctaaacttgcgagttatacgccctgccccacgacacgcccacaacccacacgcccccagcccccaagggtcaataccctgagccccgctcacatacatctatatcctaacctccacatttatatatatataaaaatatatatgtatatatatttatttatatataaatatatagtgtatatataaatatatatatttatttataaatatatatatttatatttatatacaaatattaatatttataaatttatatataaatatatttatatataaatttataaataaatatataaatattataaatatattaaatatatttatttataaattataaatatatatttatttataaattataaatatatatttatttataaattataaatatatatttatttataaattataaatatatatttatttatttataaattataaataaatatatatttatttataaattataaataaatatatatttatttatatataggcttatatatttatttatatatatatgctcataacatatatatgctctctctatatatttaatgttgaagtttggggtatagatgctccagtattctgagcttcacccttgatcttccaaagtttgaaccagaattccaggacttagccctggtgcaatgtctcacgcctgtaatgccagcaggttgcgaggccaaggcaggcggatcacgtgaggtcaagagttcaagaccagcctggccaacatggtgaaaccccgtctctactaaaaatacaaaaattaaacaggtctggtggcgcacacgcctataatcccagctactcgggaggctgaggcgggaggattgcttgaacccaggaggcagaggtggcactgaactgagatcgcgccactgcacttcggcctgggccacagagcaagactctgtctcaaaaaaaaaaaaagaaaagaaaaaaaaaaagacaaaaccaaaggagttgaatggtgaggagtggtgggagaggcctgaactccagactgaggatcctggactctttcctgggggtactagggagccatgggagggtttggagcagggaaggggcagggtcagctttggtgtgggggaaagactggagggcgggaggctgcagaggaagctaccgtgagacctaccattgtaggtcattgagacactgggctgggatgagaaaagctgcagcaagagtgagaggggaagggaagagggtccccggcagagccccacgaggcagctatgtggaagcctcagttggtcaaacccagcgaaggggacgaaatatctggagaagtaaaagggaatgcaggccttgcttttctggttaaatatttttttcttcacacttttggacaagattctgtttacacacacacacacacacacacacacactcatttctttcttcccttccttccctccctccctccctcctttcctaccttctttcctgcctgcctgcctgccttctctctctctttccttcctttttttctgtctccttccttcctttttttctttgagatggagtctcactctgtcgcccaggctgtagtgcactggcaccgtctcagctcactgcaagctctacctcccaggttcacgccattctcctgcctcagcctcccatacctggctaatttctttttttttttttttgtatttttgtatttttagtagagatggggtttcaccgtgttagccaggatggtctcgacctcctgacctcgtgatccgcctgcctcggcctcccaaagtgttgggatttacaggcgtgagccaccatgcccggcctctttctttctttctttctctatctttctctctctccccctccctccctttctgtctctctctcctccctccctccctccctccctccctcccttccttccttccttccttccttccttctctctttctctctctttcctttttctttcttggaaggggtctcactctgtcacccaggctgtagtgcagtggcgtgatcaaagctcactgcagccttgacctcccagactcaagccatcctcccatctcagcctcctgagtagctgggactacaggcatgtgccccyaagccyggctaatttttaaattttttgtagacatggggtcttgctatgttgcacagactggtctcaaactccgaggctcaagctatcctcccacctcagcctcccaaaatgctgagataacaggtgtgagccactgcgcccagcctgtatattttattgtacctccaagccaactgccagtgacacacgcaccatttttttatgtacaacaacaacaacaaaaaaccctacaagagcagctaaaccgtgacacagtgctttcttttgtgtttttcattgtttgaattttatcatggtattggcaaggccacaattttcatgtatttacacatatgtatattatttcacatatttattgttttataaattttacatttatgttctgtttttcttttttgggggggacggagtttcactcttgttgcccaggctggagtgcaatggtgcgatctcagctccttgcaacctctgcctccccgactcaagcgattctcctgcctcaggctaccgagtagccgggattacaggcgtgcaccaccacrtgtggctaatgtttgtatttttagtagagacagggtttcatcatgttggccaggctggtcttgaacacctgacctcaggtgatccacccgcttagcctcccaaagtgctgggattacaggcgggagccaccgygcccagctgtaccttgttatttccaccagctatgtaatattccactgccggagtrtaacagggtttagctaactgatcccccatggatggatttctaggtgatcgctagttactgactacgatggctgacttctttggctctatcctccctgcctgacgcaggagcatctggggccttccctgtcctactgtccctcccccaacaggccccagcccctcactgtgtgtctccccaccccgctcccaggtcagtgactggtgggaggaatttgtgtacctgcgctcccgaaatccgctgatggtgaacagcaactattacatgatggtgagaaggggaggggtgaggttcataggccccaggtctagggttggggggtacctgggcggaatgtgacggtcatgctcagtgacctggatctagacgcgccatctgggattcatcattccaccctcttttgggktcaggacctgtatttgggtcagtggctccatcgggggcaaacctgaccctgggtgttttgccatcccctctcctggtccccaggacttcctgtatgtcacacccacgcctctgcaggcagctcgcgctgggaatgccgtccatgccctcctcctgtaccgccaccgcctgaaccgccaggagatacccccggtgagagggccccagtgggttagggatggaggtgtggtcctgtggcctttgggccacgtgggtcctggaaggcagctcacagcccacggtttcctgcagactttgctgatgggaatgcgccccttatgctctgcccagtacgagaagatcttcaacaccacgcggattccaggggtccaaaaaggtgagaccctctcctgtccccactgatggaggcagaacaatatagtggctaagagcatgttttctggagtccgcctgactgagctgggaaccattgcttccttgctgtgtgaccttctgcacgttattaccctctctgagcctcagcttccactaaagtgggataataattgtacctaggggctgggcgcagtgactgatgcctgtaatcccagcactttgtggggccgaggtggacaattgcttaggccaggagttcgagaccagcctagggcaacgtagtgagatccggtctatatacaaaatttaaaaattagccaggcatggtgatatgcacctgtggccccagttaatcgggagcctgaagtggaaggatcacctgagccccggaggttgaggctgcagtgagctgagatctcaccactgcactccagcctggcgacagagcgagaccttgtctccaaatactaagtaaataaaagtcctagggtgctgatgattactagggtactttgaacaactgacgacacctaagaagtakataataaatggtcactatttttatgtgtctggccttcctgcccccatgcttctgccaacgccacccctagactacatccgccacctccatgacagccaacacgtggctgtcttccaccggggccgattcttccgcatggggacccactcccgaaacagcctgctttccccgagagccctggagcagcagtttcagagaatcctggatgatccctcaccggcctgcccccacgaggaacatctggcagctctgacagctgctcccaggtaagggtcaggggtcaggggtcaggggctctcagaggccgccagtgtcctgagactgtggaagggcagggtggggccaggtggcggctgggcaggatggactcaggcacatcccgggccctccaggggcacgtgggcccaggtgcggacatccctgaagacccaggcagcggaggccctggaggyggtggaaggggccgctttctttgtgtcactggatgctgagcccgcggggctcaccagggaggacccggcagcgtcgttggatgcctacgcccatgctctgctggcyggccggggccatgatcggtgagtgagtcttgggatggggcccccagatgtggcacccgagaatccagtatcagacctagraccccygacagtagacagccagaccctggagcccacacctgcagagtctgtagaccaggggctgcatagagctgaggaccccagacccagtgctttgggacctggagacctctgacctggggaacccctcaacctgggacccaagacctataaaccagacccagtgacccccaaatctgagactcccaaacccctgagctggaccctccgacccagagaactcagcatcacagacccagagaccccagatctgaggaccaccaaacccaggatccctaggcccagggaccccagacttggcaacctcagcctcagaacttgaaccattcaatcctcaggccttaatgcaggcaccccaaatccatggccctagacccagacttccagacctagagattctcaggcctggcaggcatcactgaattcctaggccccaggggggtcccgctgacctcccagcacccccaaaagccttgaaccttcctcggcaagtttcctaaaaatctccaaactccagactgggcatggtggctcatgcctgtagtctcagcactttgggaggctgagaggggcggatcacctgagatcaggagtttgagaccagcctggccaatatggtgaaacctcatctccactaaaaatgcaaaaattagctgggcatggtggtgcatgcttgtgatcccagctacttgggaggctgaggcgggagaatcacttgaaccctcagctacttgggaggcggaggttgcagtgagccgagatcgcgccactgcactccagcctgggcgacaagagtgaaactccatctcaaaacaaacaaacaaacaaaaaaacaatctccaaactctaaatcccagacatgtcttggagacctccagggccactactggggacccccaatggtcctagagatccccataccagcaccccaatggattcccacatcttcccatctagaaaaccccctcaagtcccacagaaagcactctgaggtccccgtgcccctcgctcttggtgacccatctgaactctccctgacagctggtttgacaaatccttcaccctaatcgtcttctctaacgggaagctgggcctcagcgtggagcactcctgggccgactgccccatctcaggacacatgtgggaggtagggcggccagccctccctggttctggggacccctgccccatctccaaagaccgtcctctccagcgccttagtgtcagaagaaaaactgaggcttggcygggcacggtggttcatgcctgtaatcccagcattttgggaggccgaggtgggcggatcatgaggtcaggagttcgagaccagcctggccaacatagtgaaaccctgcctctactaaaaatacaaaaaaattagccaggcatggtggtgtgtgcctgtaatccctgctactcgggaggctgaggcatgagaatcgcatgaacccgggaggtggaggttgcagtgagctgacattgtgccactgtacttcagcctgggcgacagagcaagaatacatctcaaaaaaaaaaaaaaaaaaaaaaaargaaaagaaaaactgaggctcagggagaggcagaggctggcccagggtcacctggcaaagaaaggggactgggatgaggaccttcctttgatgagttggtaactggggctcaaagaagggaagtgattttcccagagtcacacagcgaggagttacagagcaagaagatgactccaggctgggtgcagtggctcatgcctgtaatcccagcactttgggaggtcaaggcaggaagatcaattgagcccaggagtttgagactagcctgggcaacataatgagaacctgtctacaaaaaacgttaaaaaaaaacaaaaaaaacaaaaccagccagtcatggtggtacatgcctgtggccccagctactccggaggctaaggcaggaggatggcttgagcccaggagtttgaggctgcagtgagttataatttcaccactgcacaccagcctggatgacagagcaagaccctgtcaaaaaaggaaaagaaaataaggacagtaaacaccagttgagtattggtgttagtcctgttcttgatgaacatgaacctgagaccgcatctgtgaatatcagaggtttctgtttctcagggactgccccctacccgaaaaagggctgcatgaaaagaggtcccrggttagatggcctcagtccacagggaggaagggactctaacagcctctgtttgcccacagttcactctggctacagaatgctttcagctgggctactcaacagayggccactgcaaggggcacccggaccccacactaccccagccccagcggctgcaatgggaccttccagaccaggtgaggctgggtttctgggcctctcctccaagtcccaagattcctagccttgacttcaaactcatccccacccctaatctgaacgtgaaaatcaaccccattcctacccccaacccgaaacccatgcttcccccacccccaaatcaggccatatgcatccacaacctcaaaccccaacacgaacctcatctycagccccaactccaaccgtcctcccactgccaatcccatcctcaaccccaaccccatctctacctgtttcagactcaaaaaccaccactgtccaaccccagcaccaacccctactccattttccttccaaatccatctccatacccaatcccatcccaacaccacctgaattcattcccatgttcatcctaactccaccccataccaaaccctaaccccatacccaaccccaaccccatcctgtactcagccacgaccccacttccaatgacaacccatgcccaactcatcccatacccaacctcaaccccataccccacaccaaccccatcccgtactcagccacaaccccacctccaaccacaacccatgcccaactcgaattcacttcccatacccaaccccttccccgttctattcccaaaccactctcagtccctcctccatccccatccccaaccccagcttcaactgtggcccaaccccaatcttgttccagtctacacatgccatccctatccccatttttttttttttttttgagatggagtcccgctctgtcacccaggctggagtgcaatgacacgatctcagttcactgcaacctccatctcccaggttcaagcgattctcttgcctcagcctcctgaggagctgggattacaggtgcccactaccacacccggctaaatttttttatttttaatagagatgaggtttttccatgttggccaggctggtctcaaactcctgacctcaggtgatccagccacctcagtctcccaaagtgttgggattacaggcgtgagccaccgcgcccggcattttttttttgagacggagtcttgctctgtacccaggctggagtgcagtggtgcgatctcagctcactgcaacctctgcctcctgggttcaagcgattctcctgcctcagcctcccaagtagctgggactacaggcacgtgccaccacggccagctagttttttgtatttttagtagagacgaggtttcatcatgttggtcaggctggtctcaaactcccgacctcaggtgatccgcccgcctcggcctcccaaagtgctgggattacaggcgtgcgccaccacgcccagcccctatccccatctttagtctcatccttcaattctcttctcttctttgtccccatttccatattctgccgcaaccttaactccacatccacctccgcttccagccttattcctggctttcaccctacccccatctgtaaccccaactactcctcttccctcctcctctggcagatccactcctccatctctctagccctgaggggagccaagatcttgtctgaaaatgtcgactgccatgtcgttccattctccctatttggcaagagcttcatccgacgctgccacctctcttcagacagcttcatccagatcgccttgcaactggcccacttccgggtcagttgggttccccatccacagcccccgcagggtctcagtccacctgagcccccaagacctgcccctccacggttccttgtggtcgctgccattgtgggtcggccatcttgaattctctcttccaaccattcttgggctggctggaggaggctggaggtctggacagagataggtcaagtctgtaagatctcctgagcccagctgacagactcctcttctcctccctgtcccccaggacaggggtcaattctgcctgacttatgagtcggccatgactcgcttattcctggaaggccggacggagacggtgcggtcttgcacgagggaggcctgcaactttgtcagggccatggaggacaaagagaagacggtgggtgcagccctcgcttgaggcttcagttatttctgtgtactcactcatccacttgcaaacrttgatgggacctactgaagccagcctccacgaggagcacaagggacaagggatgaatcggacctggcctctgacttcaaagagctcactgatggggggagacagcccagcatagtgtgatatctgctttcatggtggtctcacagggcactgggggtgcacccaagaaggaaccccatttctttttttttgagatggagtcttgctctgttgcccaggctggagtgcagtggcacaatctcggcttactgcaacctctgcctctcaggttcaagcgattctcatgcctcagcctcctgagtagctggaattataggcacccgccaccatgcccagctaattttttttttttttttttgtatttttagtagagacggggtttcaccatgttggccaggctggtctcgaactcctgacctcaggtgatctccctgcctcggcctcccaaagtgctgggattacaggcgtgagccaaygcacctggctggaactccatttttacaacgtaactctgcccatttaacctctttgtgacttgtgaccttcctttgcacccctgtaccctctctgcccagatcccacctgccctgcacctcttctcccttgccctacacctagccccgcacctacaaggtattgtggttccrtggaaggagtttggactctggggccagacacacctaggaacccrcctggctctccctggctgtgtgaacctggccaaatgatttcccctctctaagcctcagttccccatctgtaaaatggggttgatattcccaccttgcagggatgtggcaaactcagttgaggccagatgtgccgcaggcccagccctaagtcgacttcctgtctttccatgacctgtgacctccctggggactgcaggacccacagtgcctcgccctgttccgcgtggcagtggacaagcaccaggctctgctgaaggcagccatgagcgggcagggagttgaccgccacctgtttgcgctgtacatcgtgtcccgattcctccacctgcagtcgcccttcctgacccaggttggggcacagggaaagggttagagagggaagtgggagaccatggaagaagggagaggtttcagggaaggagggtgatgttgaaaaaggacccatcaaggccgggcacggtggctcacgcctgtaatcccagcagtttgggaagccgaggcaggcggatcacttgaggtcaagagttcgagaccagcctggccaacttggcgaaaccctgtctctactaaaaatacaaaaattagctgggtatggtgacaggcacctgtaatcccagctacttgggagggctgaggcaatagaatcccttgaacccgggaggcggaggctgtagtgagctgagatcgcaccactgcactccagcctggacgacagagcaagactctgtctcaaaaaaaaaaaaaaaaggagggtgatgttgagaaaggatgcgtcagcagagaagtcagttgtgggggggcggcaaggcagaaggcggagaggcaacgggacaacgggagcagacaaaaggggagagggtcagtggggtggggataagaggaaagggcgtggtcagaggaggggcgtggtccgagggagaagaggagagggacgtgggtgtgggtggtgagacgagtgaggggcgtggccagatagggcgtggtcaggagaagggcgtggttagggagaaggaggcccggatttacgggtaaaaaaaaagccagggatgcagggagtgaagtggagccaagggccggaactgcagatctctgtcctgcacatgtgatgggctcctgtcctcaggtccattcggagcagtggcagctgtccaccagccagatccctgttcagcaaatgcatctgtttgacgtccacaattacccggactatgtttcctcaggcggtggattcgggcctgtgagtggagctggggcgcgctggcccccagaggaaagagggggctggggggcctgcactcctgcatagtgggggtggaggggaccggagctattttcttcccttcactctttccgtctccaggctgatgaccatggttatggtgtttcttatatcttcatgggggatggcatgatcaccttccacatctccagcaaaaaatcaagcacaaaaacggtgagacaaacgtgtatacccaccaactccctctttcctcaggaaccaggagtctgggcccccagcccctcctccctcagacccaggattccaggccccagcccctcctccctcagacccaggagtccaggcccccagcccctcctccctcagacccgggagtccaggcccccagcccctcctccctcagacccgggagtccaggcccccagcccctcctccctcagactcgggagtccaggccccagctcctcctccctcagactcaggaatccaggcccttagccctcttgtttctcagcctccaggatcccatctcccagcttcccctggctctgacctgttctccttccaggattcccacaggctggggcagcacattgaggacgcactgctggatgtggcctccctgttccaggcgggacagcattttaagcgccggttcaragggtcagggaaggagaactccaggcacaggtgtggatttctctcccgccagactggggcctccaaggcctcaatgacatccaccgacttctgactccttccagcaggcagctggcctctccraggaataagggtgaaattgccacagctggctgacacaggacaggggcaactggtttggcaaccccacatccaggccaataaagatgtgtgagctgggtgtgtggtgtctgctatgctcttgggcagggcaggggtagaagaggtaaggaccagggtggaggaggacagaagctcccatccattcccaggcccagccagggattcccagttgcagtcacagcttcaaccacagcccgcaacacctgcccagtgtacttcatttccagcttcactcataccaaacccaaccctccaaggccagtgccaatcaaacacaacctcacaagttctcctgagcctaattcctgctgccccaacaccactgtccacctcaaatccatctccaggccgggcgcggtggctcatgtctgtaatcccagaactttgggaggccaaggtgggcggatcatgaggtcaggagatcaagaccttcctggcgaacactgtgaaaccccgtctctattaaaaatacaaaaaaattagccgggcatggtggcgagcacctgtagtcccagctactcgggaggctgaggcaggagaatggcatgaacccgggaggcggagcttgcagtgagaagaaatcgtgccattgcaccccagcctgggggacacagcaagactctgtctcaaaaaaaaaaaaaaaatccatctccaaacctaaagatccagccaccccaattgacaatccccaaacgaacccacgaaaatttttattacccaaccccaactccagccatttctttttctttttctttttttgagagagagtcttgttctgtcacccaggctggagtgcagtggtgcaatcttggctcactgcaatctctgcctcctgggttcaagcaattctcctgcctcagcctcccgagtagctgggactacaggcatccgccaccatgaccggctaatttttttttgtatttttagtggagacgggttttggggtttcatcatgttggtcaggctggtctcgaactcctgacctcaaatgatccacccaccttggcctcccaaagtgctgggattatgggcatgagccactgtgcctggcctactccagccatttcaacctcttcctcaatgacggattcagctcccataactaggaaatgcactgcccagtgcacaccaccctaacgctgccatcattccagcaatcagcaactccatgatgccacaccccactatacacaacaactcaactacagttcgaaccacacaaccaacacaacgtccaactccaagctccaccatccccaccaaatatcccttctcatttccaccataacccacactttaccttgacccatagtgatgactttatttttatttatttatttatttatattttaagacggagtcttgctccgtcgcccaggctggagtgcagcggcgtgatctcagctcactgcaagctctgccttccgggttcatgccattctcctacctcagcctcccgagtagctgggactacaggtgcccgccaccacgcccagctaatttttttgtattttcagtagagacggggtttcactgtgttagtcaggatggtctcgatctcctgacctcgtgatccgcctgcctcggcctcccaaagtgctgggattacaggcgtgagccaccgcgcccggccagtgatgactttaaacaccatcatccccgagcacaccttcactgtgctccaccacccccaccattacaatctccaccagcccaactacagccatcaacaccaaacccaatcacccaccccaccaataccacggttccaacgcgccatcaatctaaccctcactgcttctgagtcaaacaataatacaacccaacaacaaaatcaaaattctaaatggctcaacctctaccagcccaaccaccccagccagactgccaactctgtgatggtttaaaaaatgtccacaagtgggggctgggcacggtggctcatgcctgtaattccagcactttgggaggcggaggcgggtggatcacctgaggtcaggagtttgagatcagtctgaccaacatggagaaaccacatctctactaaaaatacaaaattagctgggcatggtggtgcatgcctgtaatcccagctactcaggaggctgaggcaggagaactgcttgaacccgggaggcagaggttgtggtgagccgggatcgcgccattgcactccagcctgggcaacaagagtgaaaccccgtctcaaaaaaaaaaaaaaaatagtgattaggtcacaaaagacattgtggctttcttttggccgggcatggtggctcacacctgtaatcccagcactttaggaggctgaggcgagctgatcacgaagtcaagagatcgagaccatcctgaccaacatggtgaaaccctgtatctactaaaaatgcaaaaattagctgggtgtggtggcatgtgcctgtagtcccagctactcaggaggctgaggcaggagaatcgcttgaacccgggatgcggaggttgcagtgagctgagattgcaccagtgcattccagcctggcaacagaacaaggctgtgtctcaaaacaaaacaaaaaacaaaacaaaacaacacaagacattgtggcttccttcttgctctgtttctcaatcacttgctctgggggaagccagccaccatgtcatgaggacactcaagctgcccatgaagaggcccacgtggtaaagaactgagacctcctgccaacagccagtgaggcacacatgagtgagccatcttggaagcagatcctccagtcccagtcaagccttcagatgactgtcacccggctgacagcttaaccacaacttcatgagggacacggagccagaaccaccttagctaagctacttttgatttcctgacttttaacaactatgtgagataataaatgtttgttaattcaagttgctatactttggggtaacttttttttttacacaggaataaagaatacaaactgcaaacacctcagcctcaaccctcatattcttttttgaaatttgcttttatttttatttatttttttgagacggagttttgttctcgttgcccaggctggagtgcaattgcacagtctcggctcaccacaagctccacctaccccggttcaagagattttcctgcctcagcctctcaagttagctaggattacaggcaggcaccaccatgcccggttaattttgtatttttagtagagacggggtttctccatgttggtcgggctggtctagaactcctgacctcatgtgatctgcccgcctcggcctcccaaagtgctgggattacaggcttgagccaccgtgccccgcctgtttgagaccgagtttcactctgtcacccaggctggagtgcagtggtgcaatctcggctcactgcaacctcctcttcccaggcccaaatgattcttgtgcctcagtctcccgagtagctgggattacaggcgtgagccactgcacctgaccaagaaatttatttttggttggaatactgcctggcgcaatctcggctcactgcaagctccgcctcccgggttcacgccattctcctgcctcagcctcccgagtagctgggactacaggcgcccgccactacacccggctaatttttttgtatttttagtagagacggggtttcaccatgttagccaggatggtctcgatctcctgacctcgtgatccacccgcctcagcctcctaaagtgctgggattacaggcgtgagccaccgcgcccggccacgactttttttttttgcaagtagtctttcaaaaatatatttggtcctcaggggtacagaattggattaatcataattgctggtccttggcacatactattattatgtgtaccacttcttaagctattatctcttggcttcaaatctatttcccagcactgggctttgggtaactgggaatgggactctgaaaaccccactttcactttgccaagtggtgtgttagcctctgccaatagggggtgccagactgaccgtagagcctgaaggaggaaaagggttcttgctccttcctgtttgctctctgcttacttcccgttggtttcctgttctcatctgcgtcagcaaagcttcttcaccctgtccaaggcagttctttcctgtagcagcagctaaatccaatttgcagtttttccaaacttgcacatcctcagagatgccagaccatttggggatgccagaccagcacccctgcctgagaaaattccagtctcgggccgggtgcggtagctcacgcctgtaattccagctctttgggaggctgaggcgggtcaatcacgaggtcagaagatcgaggccatcctggctaacacggtgaaatcctgtccctactaaaaatacaaaaaataagccgggcatagtggcgggcacctgtagtcccagctactcgggaggctgaggcagggcaatggcatgaacccgggaggctgagcttgtaatgagccaagatcacgccactgcactctagactgggtgacagagcgagactccgtctcaaaaaaaaaaaaaaaagaaagaaaattccagtctctagtgatcctcctctgagctcagaaacaccagcaccatctgagcagtgcctcctcttcagagcctcagtttttttttttttttgagacagagtctcactctgtagcccaggctggagtgcaatggcgtgatcttggctcactgcaaactccatctcgcgggttcaagtgattctcttgcctcagcctcccgagtaatggattgcagacgtgcgtaaccacgcccagctaatttttgtatttttagtagagacaggttttccccgtgttggccatgctggtcttgaactcccaacctcaggtgatccacccgccttggcctcccaaagtgctggaattacaggcgtgagccactgggcccagcccagaggctcagttttatgtccactggctcctgatccaaatgtatagtttttaataactctaacctttgtctttgtttttcataccctagtgagataggaatttggcaagactggtttccaagacaacaggacacaagacctcactcataagacagaaaacagcaaaagaaactggctaaaaccagctagaaccaagaggacaatgaaagggacctctggggccgggcccggtgcctcatgcctgtaatccctgcacctagggaggccgaggcgggtgaattacctgaggtcaggagttcgagaccagcctgaccaacacggagaaaccctgtctctactcaaaatacaaaattagcccggcgtggtggtgcctgcctgtaatcccagctacctgggaggctgaggcaggagaatttcttgaacccgggaggcagaggttgtggtgagccaagatcgcgccattgcactccagcctgggcaacaagagccaaactccatctcaaaaaacaacaacaactaaaaaggaagtgacgtctggttactttcactgctcattatatgctaattgtaatgcattaacatgctaaaaacactgccaccagcaccatgacagtttacaaatgccatggccatgctgaaaagttaccctgtgtggtctggacggggtgaaagcccaggttctgggaactccctgcctcttatctagaaaacccatgtgtaattcaccttttatttagcatatattcaacaactaaccattaaaataaccaaccaacgatcctcagagctactctgcctatgaggttgctactcttactttcctttctttctttttttttccaattgtaaagtgctgatcctgtttatttggcaggaaaacgagacaatccagcagcccaggagggacaggtggacttaatcctcctcctcgtcgtctccagccccaccctcaccctggcccttcttggcgttcttcctcttcacgcggccggggcggccaccccatagggagagcgcagagacaagtcgatgcgcttctgggaatccaggcggacaatgaaggacgggatgttcgccacctgattgcggaccctgacacggcgctggcggatcagtacgccagcgtggtggatggacttggccaagccca

SEQ ID NO: 97451 - DNA, 16735 bp, Homo sapiens
tactttcacctgcctggataccatgtgaccagcgtgtacacacgagctgggaactatgttcatctgcctggataccacatgaccagcgtgtacacacgagctgggaacatactttcaactgcctggataccacgtgaccagtgtgtacacacgagctgggaactatttgcacctgcctggataccacgtgaccagtttgaaaacaagaggtgggaacatactttcacccaaaagtcatgcctggataccacgtgaccagtgtgtacacaagagctgggaacatactttcacctgcctggataccacgtgaccagcgtgtacacacgagctgggaacatactttcacctgcctggataccacgtgaccagcgtgtacacacgagctgggaacatactttcacctgcctggataccatgtgaccagcgtgtacacacgagctgggaactatgttcatctgcctggataccacatgaccagcgtgtacacacgagctgggaactatgttcatctgcctggataccacatgaccagcgtgtacacacgagctgggaacatactttcaactgcctggataccacgtgaccagcgtgtacacacgagctgggaactatttgcacctgcctggataccacgtgaccagtgtgtacacaagaggtgggaacatactttcaactgcctggataccacgtggccagtgtgtacacaagaggtgggaacatactttcaactgcctggataccacgtggccagcgtgtacacacgagctgggaactatctgcacctgcctggataccacgtgaccagcgtgtacatacgagctgggaacatacttttacctgcctggataccacatgaccagcgtgtacacacgagctgggaactattttcacctgcctggataccatgtgaccagcgtgtacacacgagctgggaacatactttcaactgcctggataccacgtggccagcgtgtacacacgagctgggaacatactttcacctgcctggataccacgtgaccagcgtgtacacacgagctgggaacatactttcaactgcctggataccacgtgaccagcgtgtacacacgagctgggaacgtattttcattttcggcggaaacttactttatcaagccatcttccacgtgcacatcagcgtaaaaggactggtcgtcattcacgatcctcccacctctgatcagaaggcggtcactctatcgggaacaacaaagggtaatttttctccaaactgagttactcagtaacactcttggtgcaactccttcctctgaaattatgactgaaacattcaggcaaaatttctagacgtaaaaacgagcacaaaagcctgcagcggcttactattccccaagaagtggcaccaggcgctcaaaaacagttgcccctggaagtgccacgcacgccccacagctgctgctcagacctcgctgagggcaaagcccgtgttggtgaaagtgtggtagtgccacaggtcatatttatatcttctgatttaccactggattgaggagccccagcctgaggtgggaggcgaacgctgcctcatggcctcctgtgcagcctcagagatcctgctctcctccaccctgtcttccacccacgcagaggaggctgggagcggacggagctggactttggttccacccaaacactacagaccagtgatggtgccaggaggcggaggcagacagcgcccccacaggcatggtccccaccccaggaggctgcctcccactgaggggagaccaacggcagcaaaaacacacgtgcacagatcatcacagtcggtgacgaatgcgcagagcacagtgagggcgccatggcagggccatgagagaggggctgggagaaggacctctggggccagggtggctgatacaggggcaaggcagacatggcgagcgttccagccaggaagcagcctggccttggggcaggaaagggcttgagctgccatcagcagacctgggaggaggccgagggatggaaccttctggtggggtggtggtgccagaggcaagtcggtgcccagagcttggcaggggcaggatatgtaggcctggggactccatggctgccccctgactgggggccttaagcaggtttcaatcctggtttgatgttttaaagagatcacctttggctgctgtgttagaaagtagcttgtgacaggtaacagtgggagccggatcattgctggggtgatttctgagtgagatgaggggctctgggacaggactatgggaagggacgggaggagagtggattccagagaggctgggagtcaggagggcaggacttgctgaccaagaggccatgggggtgatggggaagagatggggtgacctcggttccagtgcagctcggacgcactcccagtgggacacagagcgtcaggctggtgaggcccgctctttgtaggtcagccctggcagcacagagctgtggcgttagacagggattgactccagtgcttggcagtcataaatccacttctaagaatcctaccagatggccgggaagcagaagattaggcagaaagtagggtgtcactgatgggactctgcatgaccgtcagaggtgaagatctgacctcattggagaatgggggagagaaacacaaaaaaggagtgaaaggaggtggagaaggacgcgcccacgggctggactcggcaacgcttttccctccaccgtctggcgtgcgcctcagcacgccctgcaactgacccggcaggactgaccgtctgcatttaacagggaggtccggccgcctgctctgggtttccagggcccacccataggtggccagggccctagcctggggctgcagccttcacgcaccgtcagtctgaagccaagagcattaaactgaagtgcacaattggtaaaactctcagaatgagaaggagttcattatctaggaactccattacaggattcactgctgacatctaactgtggggctgtattttcaggatcccagtgacttgtcaacctctaccccatagtctacaaacggttggcagactatgccacaggccagacccaaccctctacctctcttcatacagccctaggctaagaatcgttcttgtatattcactgaaaacaataacaagagtatgtcatgactcaaaaattctatgaagttcacactgcagcatccacagataaagttttgttggaacacagtggtgcccatcgacttcctaaatgtccaggactgctttcctggcagggccaagcagctgagacaggaacagcgtggtccgcaaagctgacaacatttactctcgggctggttgtggaagaagttttagacccttggtctacagagctgtctgttcccagccgctgcacctctcctcctcctgcccagtcccagctgagcgccaggctcagccctgacccggcaccaccatgcatttgcagagcctctgtggccgcatcaggccctggctgccttcccggtgctgtccctcttcttcactttccacccctcccaggggacccacgcattttcaaggaagccctagaaaacgcaaccgggcagaaggaggcttgaggagacgtgtggtctgggctctctgctcataggcgcccaagtgttcaggcacccgcactgagactgggtttggaacccagaggagacgcagctggggtgtggggctgtgctcttcttactgcactcatccggatggaggtgaaagttcccgggaagcagctgcccctccgcactgacatggttgcctgacctcccctgggaaggggtcctcctgccacccccaaactcgacccccacatgccagctgactggcaagacctcctgcatcaagaccagacccagccgggcagaaccctctggaggcagcagcccctcccatctggagaggggagggctccttcctcgctcagagtctgggggagtggagcccacagcccacggctcgagctaatgccagaggtcagaccccacggccctcccgccgaggccaagtccagagtcgggtctgggaccccatggactcccccgcccaggtcctgccgggtcccgaagcctccttcctcccacccccatctccccccgcccgagcggggaggctttgtttctggcagagcgggacctcccgcgccggtgcgtgtgggtgttggggaggggtctctgctctcgaaggttcaggggctgccagggttcccggccagtggcccttgaccgctcgctttccttggagtcgctgaacccaggttactggaagggttcggggccaccagggactccggccagagcggccggggctaaatcgctttgtctcggacaaagagctcccgacgcagcgccagtgcgtccaaggggcgggcgacccacgggctgcgccgggaacggcatctccccgcgccccggaccagcccgggccaacaaagggccgcgtccgcccgcctcgccacccgaccgccgtgggagaaaggagccgctagcgctccgagggacaggccgcccggccccgggttctccccgggcgcagccgaggctcccggaagccggcaaggccgggcaaggccgggcagggcccggcagggcccggcagggccgggcagggccgggccgggccgggcctgggcgccccgctccttaagggggtctgcgcggcgctagcggggactctcggaccctggggcgcgaaggagccgagcagggaagggcgggcgccaggacagggaccagacgcaaaggcagggaccccccacccacgcacaagaccaggagggtccgcccggcgtccaggccccactccgggcggcgggcagggggcgccgggcgaagcgggaccgggctcaccgtgatccgggggatgcttttcttgccctggaaggacatcctgctcctgggggtctctggtaggggcggcacaagcgggggcgggcgggcgggcgggcgggcggggggacgcgtgagccgggacgcgtgcgtggggacggcgggagacagactgcgagcgcgcggggccgcacggctccgttccggtcccgcccccgctgggccccgcccccaccccggctccgcccccggcaggccccgcccccgatagggcccgccccagcccgagccccgcctcaccccgcccatcagccccgcccccgccctcagccactccttcgctttaaagcccccccagcgctggaaccgctgcagggtctgatctctgcaccccgggcccccgcgcagacccgcggacgagcgctgggtggggatttcaacctgctccagctgatgtgcgcggggtttgcaccccggggagacgagggagagagtccggccacgtcctgccaggccccgcccgcgcccccgctgccctccagcgcggaacccaggtcccaggagacgcgaggcgcccaaggccccgggattccgagccagtcaaccccgggccgcgacgctctgggaaccacacccgtccaggaaggcaccttggccaaagccggctccttcgcagatgacccgggccagggtccgagcgccaggctgtgaccccgcgaggctgttccacgctggccgcgagagacggagggcaggaggggcccgaataggacagagagagagagagagagacagaaagaggcgcacgcgctccccagggaccgggacgcggtggtgggcgggacctcgcgggggtggggggtggtcgcaggacccagaaggctcaggacctttacggatagggaggaccccgcaggggggagcgggggagccccacgcccggcgtcctccgggtgcgagggtctcggggagtccgagcccgggcccacggcctctgtcccgcggccactacctgctgggggtcccgggcctgggccacgccgggctgccctcggggacttgctgcggccgttgaggggtctccgcgcgccgcgcagactcgcctcccaacccgagggcccgggcggccgccgcccagagcgtccagcggcagcgtcttgctctcgaaggcgtcctccacgcagcggaacacgcagccaagcttgggccgggccagaggcctcgcgggctcctgaggctgccgcgcggtcacggcaggagcgggcgacagaatccggtctcggagcctcctgtagcgaggtctgcgcggcaggtgcactgggcggacctggaggccgcgccctccccccccgcctcctgccgcccggcagcgctgcgcggagctggctctgtccacgtagcgggtgctgaacgccccattctggcccctgggtgctcgcttagtcccggccacgcgtggctgctcgccctcgggacacactgggcgctgggaaggccgggcggggagcgcgcaccggagaaaccgctgtgggaatcccggccacatttccaggccccttgggccgtcccacgccagacaagaaagccctgactccgaaaccctgggcgagtgtggagggcgcgcgggggtggggtgtacccgcccacgcaaactgctgctgatctcccttaaagccgagttagaggcttggggcgagacaggagtgacgggcgatgctgtcactccatctgtcattctacccagcctgcagcagctgaattcgaacccagagacttcaggcctttgcgttgttaccgcagtccgcatttcaaagccagagtttggccactgagtcaccatgacctcgagtactggcggggcccgagccagcagagctaggtccagcagcttcccaccccttcgtcctcctctgggctccccctcccctaaatgattaatgcaatgtctgttactcacctgtgtgggaccgtccacggcaaatatcaccaactgttcttatgcacgtgcagaagttccgtccctttcctaactgtctgatctcttccatggttcacatttgaccaacagccacaggagggagcctcccaggtggtcgaccggagccaggtgctgccaggcacccgactgcagagcttgccctccaggtgatctcgcaggtgagaactggggctttcctccacagtgggcggaaggcgcggactccgtttctggtgtgcagaggcactgttcagagaatgaactcagaagtgcagaaatggctcatacggctttcagttcaaactttaatacctttgaggggactttaatcgtctaagatttaaaacattttttattaaaactgtacaataatttacaaacgagtaaaaaattctctggtatatatcataggaatcacaatacaaaaatatttgtaaaatcttgtagatcaccatacaaacctattttaggcctgtgaatactgcttagcatggaacggaatgtcacgtggttagagggtgactatgaagggagtgcctgggagaatacacacactacctggcatgccgccgtaagaaaacaggcccggttagtttttgcataaatttacaataaagctttttaaaaaatatacagtaaacaaatatatgatttgatacctatattcacaatatgagtttcctgaggctaaactgaattccattactgtgataaaacacacactctctctcagggtttcaaggatgggatgacggtgagttggcgaatgcgtcagtgcctccaaacccacacttgggcactctcttctttttgacttctagtatcggtgttcacaagccctgtaaggcactcggggtatcctgaaggctacagattctgcaagggcagagactttaaggaacagccatagtccttctccagctcaaaatctggaccatgggcacaaggtaaacaacacactggtgtcaacaaaggaatctgctatttatgtggatttttactttagacaaactaaagtatctatgttgttctgtgtgttgaacacagagtgtgatgatgttaatataatgtaaatgttgatgtaacagtacatttctggcaacatttcagggtccttcctcttgccttattagggggtgatgcattcakacagacttcccytgttagaagagctagcagtaagacagcccaagtacttggaggaaattcactctagcccattggtttrgaaaagaaggtatagcctgcaatttagaaatgcaccttatttttaaatacttgaattctgctgctgctcactggaccaggaggagtcagtgataaatgctcatatttacctttttgggggcaaaaacscagttctgaaatgctgggtattgtaatcagatgtaaagaaggtgcctatgatagacgagtgaaaacaatgatatctaaggagaggaactgacgctccaactagatgtgtgctttcaggaatggggcagagacgcgatgcagtttggatgttattcagcacattccttgcaccttctcccgttcctatatacatactttttacatataaacaattacaacttcataaggatttggtacatatttacatgcttctctttgccrtatagtttgccttattattacagaactgtgattaagagtgtctgtggtggatagaggtgtatgaagtgctccagacatatatacaacatgctaaaccatgatgacccaaataaacatgagggatgtgaatctgggaatgtgagtttcactgcacatctttagatccgaaacagctggcccatgcagctgttgttcccatgcaggtacacattgggaccatgccaggagctctcccagaggaggaggccaggctggcagggagccaggtagagttacaacatatttctggatgcctgcatcgtagagtccatcggacttcaacccagcggttcacccacagcgccacggtagcttttattaacacaaggctattgtgtgccattcagttgtgagtataataaatgtgccaagaagatgcagtcgttaaaatgagacaaaactaygcacagaggactaaacaggatttcagactcgagacgcaaaccccgaggtcaggctcagctagagacactgaactggcccagtatcttgccgagtaaatcaggaactgtggcttgaatgacaacagaaatggatgggtctttcttggacaagtgctgattaatagtgcattttccagcaaaaatcctgcagccaccaaagaaaaagcatatctgtctgatactattagcttttccctgatttcaacctagggagccatgcctggtccgcagccaccgtgtcatctgccccaaagtcagacatttcttctgacacaaatataaaatgagcctaatacttccagacaacccagtcytccctayggcagctgagtcgtgtcttttatacaatgctgccagtaacagtcacacctggctgcacagctggctgcctcaacttctaggtgcctcgaaatggctaaatcccacgaatggctcttctggttgcgtgaaaacatgcataaacgcatgcttgtgcacacaagtgagcacacacacacacctcctgtcaattcagctctgagagcagaaccttagcccacctagggtgggaggacacagaagttccatctgcagccagtcaggctccatccacaggctggacgaagctcccgggctgcgtcccgggtctcccagcaggaatggaaatcacacctaacgttgccttcaccaatgcactgcttcctctctgaaaaagagtggagaaaacgccgtttagtrcgacgacctggggaatgtgtgtgacccaccacaggtcagcactcaaggcagttggggccttgaccaggcactggctctgcacaggatggtcactgagccaatggcaggcactgccctcatgggtccagcaccagctacagcgccacgtcctgagcctccagcccgggagacgcacctggcacccaccgaaggccacactctcaggaagatgagtccatgctcctcacaaagcccctacagaagtgaccttggatctttctcaccatgtctgggccagcagcccggtttctacccaacttccctcattgcttagaaagtgggcctctgctaagttcaaagtttttattacctttccattttttcatgtttttgaagaagttatgaaggatctgcttttcacaagggcgggccccggatcagtccctggggcatggcagcatcgggtgggaggccacgtgggctgaggggcgggagcgagggcacgctgggacagaggcagaggggcgggagtgagggcaagctgggacagaggcagagggcccggccgtagagacaccacggttttctaatctaggagaggtctgaagagctttttggtttttgatttaacctaacttctaagtaagaagatattacctcaaacagaatgaaaaataaatgtagtcaaatgacacatacatgtttacttcttcccgtattaagcgttacagttgaaatctctgctgcagttaacatagtaccttgttctttgtgcctttaatcgggttcgtttctaaataggttgtcccggaaccatcgatctctagaaggtacaggaggaaggggacctgccagtccagccctcatattttacagagggaaaaggtgaagccccatgtaaaacagggatttccctcggtgacacttccaggctgagaagggccggggatctggacacctacccagaaacactcccaccctgtcaatgcctctctgaattatgtgatcaactgcctggagtatgaactaggcacatgcaaatagagaacagaggtcttgttgaaaatatratgctgaattttaaaaactcactccccaaattraaggaacaagaccagagcatttggtttcctgtggtcacttgatccctctccagagccagctgctgctctccattgtcagcacactccactcactgccctatttccagaacaggagactttctgccccatccatggccgcaacataccactcacacacacacactacatgtgcacgtacacacaatgcacaatacacatacctgcacatgtgcaaacagcacatacacactgcacatgcatgtacacacaatacactacacacacatgcccacacaatacgcacaaatgcactgtacatgtgtacacacaatgcaaaatacacatacaggcacatgcaatgcacaacacatacacatacatgcacatgcccaaagacaccactcacacacagcacacacatgcacacgatatatacacacatgcatacacaacacaccactcacagcacatgcatgcgcgcacacgcacacacgcgcgcacacacgcgcacacgcgcacacacacacacacacgcacacgcacacacacgcgcacacacgcgcacacacacgcgcacacacacgcacacacacgcacacacacgcgcacacacgcgcacacacgcacgcacacacgcacacacgcacgcacacgcgcgcacacacgcgcacacacacgcacacacgcacacacacacacacacacacagttctgcttccaggtttgcagtcttcccaaatccctcccgccctaccccgtctgttccgtctcttctagggaacgtgatcttctccctcccacccaccctcccctttctgggcactgtccctcacagtcagctgaggacctcatccaaactggagccatgtcaggcacaggacaggtgggaggcagccatccatgggtctggccttggtctctgtggctccatggggctcctcaatgcccccaagcaagctctggcaccccagggtcctcactcaagagtgtctctgtggacaggcctgaggctgctagctgcagaagtgcctgcttgcaacggtggccattggctggcgtctgggaacttggcttcgaagcattcctttagtgaggaggttcctgcctagactgtgcaaacaatgtgattcatggcaaacaccagccttccttttgagggcctggcatgttagtgggtggggggcgcacaactgagtagcccccaaatcaaaaccatgaattttgggtcttagctggaatttcccgagcagaaacactgcatatatggggctgtgttttgctgctggagggagtgtgtgccccgtgtgcacctcacagggggaagagcatgggaggggagagagcacaggaagtctgctcacaggcctctccaggctgtgcctgtgaactcttcccttgcagatccagccatgcctcccgattatagggctgcgataatggtgtggctgtgccatggtgtggctgttgtggtgtgaccctgccgtggcgtgaccctgctgtggtgcgaccctgccgtggtgtggccctgctgtggtgtgactgtgtgctgagtcctgtgaatcctagcgagtccccagagatgcaggtggtctcggggacccccagaacatctgctttcactgttgcctggaagtgtggggggtggggggaacatggggctgcgaattgccttcagggagcgcattcttttacgtacttggccattcacgtggcaaatgtttatgtgagtgtatcagtgccacagtaagggttccgcgggagaaacccagataatcctcatcccaagagctcccagttctcagggagggggcaggaaagtgctgctcaggtggctgagcttcgagtgacaggagagaggtaggatgtggggagctcaggcatagtgcaggtggagccccaaccagctcagagcccggggagcccaaaagtcccgtcaacaaatacagccccgtgaccgtgcatgatgctgggggaggatgagcactgagggcccctgcccttcacgctggaggggaaagcctgggtaattttatcttgggctgcaacgaggatagctgatgaagtgtaggaacaagttgacaaccacaatcatgaacttggctcattggacagtgccaagggcggcagcagggacaggagatggcagcatgcctggggcaccacccagggctgacacagggtgtttccacaggtcggggcccccagccccacgggcacgaaggcaccagaacctcgctaaaagctgcagggcagaaccctcatcaataccaccatgggtaccacgtgcagacgtagtcgtacatatggatcaggaaacagcattctgattgatgtcaaaacagagccggaggaacaggcccctgccgtctgtgtgtgctggaaatttccactgggatctcaactgtttggaaacataactcagttggcaaggaagacaagaaccttcctggggtccggaactctgcctgcttcagaatcaacagatgatgaatgccactggaaggctcgggacctacagcctcagtttccaaaaatgtgcatgagacaagcaaccccagggttctcacacagggtgagccgcttgggagggggtgagaccctgcagtctggatccttgctcttccccaacaccgccccacaaatacacagattcccagctgataggacatggagtgagggccaagcacaggacctttccccatatgctcttttgtctgagaaactttagccaaacattttcaaaccaaacagaaacaaatggcagccactaactctgctcacagtcaaggtatttttttcttgaagctctgatttggggaaaatatgaaacagaccttacccagacacaggctgtgcctcctcctccctcttcctcctctacccccttcatggggtctctctcaactctacagaggggaccagtgctgttatcaactccctgtctgcccagggccgcctctgaggtcatcctctccccagccaccacggcggagccccatgtggctcacacggatgctggaatggtcctcccatcctgggacagtcctcaggcacgtggtgctctgctctgggtcaccctcctactgattttggctctacagctccctaataaataataaaggcagaagccactttgatggtgcaggtggcaggtgggacagtgaagtgggtgcacagaagcgggtgcacaggagcaggttcacacacaaccaaatgcacagtgtgcacagacacacacactacccagggcacaagagcaggtgcacacatacacgcacactacccagggcacaggagcaggtgcacacacacaaccaaatgcacagtgtgcacacacacgcactacccagggcacaagagcaggtgcacacacacgcacactacccagggcacaggagcaggtgcgcacgcacaaccaaatgcacagtgtgcacacacacgcacactacccaggacacaggagcaggtgcacacacaccaccaaatgcagtgtgcacacacacacactacccagggcacaagagcagatgcacacacaccacggccaaatgcacagtgtggacacacacatgcacactacccaggacacaggagcaagtgtatacacaccacggccaaatgcacagtgtgcacagacatgcaccctacccagggcacaggagcaggtgcgcacacacgaccaaatgcacagtgtgcacacacacacacacactacccagggcacaggaggtgtatacacaccacgaccaaatgcacagtgtgcacacacacatgcacactacccagggcacaggagcaagtgtatacacaccatgaccaaatgcacaggcacactccccccacacactggcatgtgtgcacacacgtgcgcacactttctgcctgttctccatgggttcctggtttcattttgtatctggtggcggcagctgttctcacaggcctccacagcgatgcccagctaccctttctgaaatcggcttctctaataatgacatcccctattaacggccccatggccaggctagtaaaaggatccattattgctttaaccaagatggttgcattatagattgcaagacagctggcccgcaggctgtaagctgctggctgaaaagaataaattagacaatagagcaataaagcggggagggggactcatggtttcaagtcagtcgttcagtttctgagattttgtgcaaatcacccagtaacatttgagaaacaccttcgcccttggtaaaaacagaaagattctaaacaaagagcaaagagaaatagctccaaagccaataggaaccagaaaagaggttggcatcatctcccaaagtcgaagattccaactcctaatgtgacccatgaggagtcgcggcaccagcgcatccggagactccacaggaatgttcaagaagcagcactcgtaacaagcagaagcctggaaataaccaaatgtccaccagaggggaggtaaagccccagcacgaggtcacagattggagggtgcacatggctgaatccctgcagagtgattccaagcacaaacacccaaaaaaatgcccgttaacaaagatttcaaacacaattaaagagtctgccttttggaaatgtgtctgctgccgtgatcgtatagcggttagtagtctgcgttgtggaaacgtgtctgctacaaagcactgcacaaagccctcatggggaggggatgggatgggccacgaagtcagaggtcagtgtttgttttgggtggcagccacagatgtaacaatgaagggacgaaatgagcaagcagctgctgcagaccagcagcaagagcgaggcacacaccagcaccaggaccaaggccatgctgtgcaccaagaaacacgaggacgatgctgtgctgaggatgaggggaccaggcaggagctgccagcagggaccctcccgctggttctgccatgcaaatgcaacgtgaccccatggctgcctgtgagctggaggctgcacgggagctgcttctgccatcagacaaacacacggctgagcccagggcagagtccctccccgttccctcttgcggctggagccctggctgatgaagctgccttaacgggcaggtgctggggggcagatcctgcagggaacatggtgaggcaccttgaagactccgccccctgatcgggatctggcagcctctgcttccaagagagacaggcagtgcctgggcagtactcagggaggggcgcttcccccagctcagcaactgccctgggaggggacagccccaaaggactaattgttcacacttgggtgagctgtttctaaacacctcatcttttatttctctttctttaacaatatagacaaattcagtaagaaaacaacttcactggtctatgatgcagagcattacacatttcttttaagtgaagcttcctgctccatcatgcacgatggccatgaactgtggatacatcctgaacaggggcagccttttaaaatccctggattttaagatgaccaaacagacatcatctccagcagcagcatggaggcggcagtctgtgacccagctcagaagagcagggctgctcattggcattcaggcgcctgctccacagaagctgtaaatctgaacctgctgacagttaatcaacacacctcgagcttccagaccctgagtggccacaggcccaggccctagagatccagcccaccctggggtcaaatggggaccagacacgctggctctgccggctcaagggaccccaccagcatccctgctttcccatcttgtggtggcagagtaaggtggacaccccagccaggacggcactgaccacagagccaagcagaagggactttaataacaaaaaggaggagttattgaccatggggtggaaggagacaaggatgttcttgggtggacattcacatgcaaaaaataaacttcaatccatactgagccccatatgcaaaagttaactcaaagtgaatcacaggtgttttaaatttaagacataaaaccacagattctagaaggaaatgggagaaaatatttgtg

SEQ ID NO: 97452 - DNA, 15553 bp, Homo sapiens
aggctggagtgcagcggcacgatatcaactcactgcaacctccgcctcatgggttggagcgattcttctgcctcagcctcctgagtagctgggactacaggcatgcaccaccatgcccggctaatttttgtatttttagtagagacagagtttcaccatattggccatgctggtctcgaactcctgacctcgtgatccgcctgcctcggcctcccagtgtgctgggattacaggtgtgagtcatggtgcccagcggccaattcttgttttattggcacataacaattgcacatatttatgggatacatctgacattttgatacatgcatacaatatgtaataatcaaatcagggtaattcgggtatccatcaccacaaatacttatcatttctttgtgttgggaatattccaaatcttccagctattttgaaatatgcaataagttattgtttactatagtcaccctactttgctatcaaacactagaacttattctaactgtattttactgtatttttgtatccattaaccaacatctcttttttttcttattctttttattattatttttcagagacaaggtcctgctctttcgcccaaactggagtgtggtggcaagattatttgtaacctcgaactcctgggctcaagcaactctcctgcttcagcctctccattagttgcgatgacaagcctgcaccactatgcctggataatttttatttgtttgtttttttgtagagatagggtctttctatgttgcccaggatggtctcaaactcttggccttaagagatcctcctggctgggcgtggtggctcatgcctgtaatcccagcactttggggggccgaggcaggtggatcacgaggtcaggagatcgagaccaccctggctaacatggtgaaactctctctctactaaaaatacaaaaaattagccgggcgtggtggcaggcacctgtagtcccagctactcgggaggctgaggcaggagaatcacttgaacccgggaggtggaggttgcagtgagcctagatcgtggcactgcgctccagcctgggtgacaaagctgaaactctgtctcaaaaaaaaaagaaaaagaaaaagaaaaaaaagaaatgccaatgtgagcaaatctcttctgaaagaagacggctaggcagggcataatggctcaggcctgcaatcccagcactttaagaggctgaggtgagtagaccacttgaggtcaggagttcgagaccagcctggccaacacagtgaaatgctgtctctattaaaaataccaaaatcagccaggcgtagtggcacacacctgtaatcccagctactcggatgctgaggcaggagaatcgcttgagactgggaggcagaggttgcagtgagctgagatcacaccactacactccagcctgagtgacagagcatgactctgtctcaaaaaaaaaaaaaaaaaaaaaaagccgggcgcagtggctcacacctgttatcctagcactttgggaggccgaggcgggtggatcacctgaggtcaggagttggagaccagcctggccaacatagtgaaaccccgtctctactaaaaatacaaaaattagctgggtgtggtggcaggcgcctgtaaccccagctattcaggaggctgaagcaggagaattgcttgaacccgggagggagaggttgcggtgagctgagatggcgtcattgtcctccagcctgggcgacaaaagcaaaattctgtctcaaaaaaaaaaaaattaaccttgactttactcatccattaaacatttaccaagaaatatttgttgtgccaggcattccctggcactgaggctacgaagaggtataagacgcttgccatagaataattcatatttagtcagggaaagagacttgtaattaattcaaagagagagatggacattataatagaaacaccagtggactcttggaattcagaaatcaggatttttatcttgagaaagaccctgaaaaggcttattaaatggatttgtatgatttttttttttttgagacggagtctcgcactgtcacctgggctggagtgcagtggcgcaatcttggctccctgcaatctctgcctccagggttcaagcgattctcctgcctcagcctcctgagtggctgggattacaggcacccgccaccatgcccagctaatttttttttttttttttagtagagacgggggtttcactatgttggccaggctggtctcgaactcctgaccttgtgatccacccgcctcagcctcccaaagtgctgggattacaggcatgagccaccgcacccagacaggatttgtttgtttaatgaggcacaaatttgaatgaaactatcttcaaggttgttgtacaacaaaagcaaggcacttaaccagtaagagagacccagataactacaacggttgtatgttttgtttttgtttttatttttgagacagagtcttgctctgttgcccaggctggagtacagtggggtgatctcggctcactgcaacctcgcctcccaggttctagagattctgctgccttagcctcctgagtagctgggattataggtgcgtgccaccacacctggctaatttttcgtatttttagtagagatggggtctcaccaagttggccaggctggtctcaaactctgtcaaagtgctgggattacaggaacgagccaccatgcccaggaaaagggtgtatattttggcctggcatggaattaattctttactctttctgaagcacacttttacacttattacatatctgaagtgatgacttaaaatattcaggcacgtttcattggaaaattacgtggtatagtggggttctcaaaaatgagaagttctcaaagatctcaagaaaattttcttggctggacgtggtggctcacgcctgtaatcccagcactttgggaggccgaggggggtggatcacatgaggtcaggagttcgagaccagcctggccaacatggtgaaaacccatctcttctaaaaatacaaaaatcagtcaggcgcggtggcatgcgcctataatccccgctactcaggaggctgaggcaggagaatcgcttgaacccaggaggcggaggttgcggtgagccaagatcgcaccactgcactccagcctgtgtaacaagagtaaaattctgtcccaaaaaaaaagaaaaagaaaatgtacagatgcacacatccacacaaacacagaaagggtctgggtggatatttaccaacgtgttatggaacaacataacatctgggtgcttttttgttttcattttcattcatctgcttttccagtttaccttcagttaatttgtattgtttatctaataagaaaacccacaaggaatgtaactaaaccattcaaaagcaaagcaacccccaataaagacaagtccagagtatggccaggatgtgggtagccggcatagcgtggagaaaggtctagagttaaggaggtaaagcactgtgaagttctgacaatggtgtcgtggtggataatgggaggtggcactcttcagtgagtgcagtgagaggggactgagcagaaggtcagtaaggacagggactagggaggacagaaagtggtgtcatagaaagcctggagcctttcctttcctcctcctcagtctctgttacccacacacaagccacctccctagaaggaggcggtggcatcttagctggtcttctgtcacctgtctcttcctatctctagttcatcctacccacagctgttagagtagccttctttcagcactttttttttttttttttgagacggagtctcgttctgtcgcccaggctggagtgcagtggcgcgaccttggctcactgcaagctccgcctcctgggttcacaccattctcctgcctcagcctcccgagtagctgggactacaggcacccgccaccacgcccggctaatttttttgtatttttaggagagacggggtttcaccgtgttaaccaggatggtctcgatcgcctgacctcgtgatctgcccgcctcagcctcccaaagtgctgggattacaggcgtgagccacggctcctggccctttcagcacttttaaaaaaaaactctgtcctggctggttgcatggctccagcatgtaatctcagcactttgggaggccgaggggtggctgcggatcacaagggtagagttgaagaccagcctggccaacacagtgaaaccccgtctctactaaaaatgcaaaaattagctgggtgtggtggcaggcacctgtaatcccagctactcaggaggctgaggcaggagaattgcttgaacccaggagacagaggtcgcagtgggccgagatcgcaccactgcactccagcctgggtgacagagctagactctgtatcaaaaaaaaaaaaaaaaaaaaaaagagcaaccaaaaaaaaaaaaaaaaacaactctgtccttgctcagtcatctataataggtctcagctgcttatttaaaataaaaatctttaaagcccttcccatcccatcctgggttacccagctcctactttcagtacctctctgagctgctgcatctgtaaaatgaacatattgtactctgccttgtatactggaataatttttttttttgagacaggatctcactctgttgcccaggctagagtgcagaggcacaatcatggttcactgcagcctcaacttcctgggatcaaaccatcctccaaccctcaacctcctgagtagctgggaccacaggtacttaccactatatccagctaatttttaaattttttgtaaagatgatgtctcccaggctgaagttatcctcctgcctcagcctcccaaagtgctgggattacaggagtgagccaccatgcctggactggaataaattaatggaagaaagggtgctttaaaaagaattgttctcattgcaacctaatttcttagtagtccccagttgagtcttccacttcagtatttttttttttaataattgtagatttacaggacattgcaaagaaatgtacaagggaagtcccatgcacccttctcccaatcttaatgtttcacacaattaaagtataatataaaaaacaagaaattgacattggtccaatccatagagcttattcagagttcaccagatatacatgctgtcaatatttttgtttgcgtgtgtgtagctgtatgcaattgtaccacatgtagccttgcataacgaccaccacaaccaagatccagaacaattccattatcacaagactcctttgtgttacccctgtctggccacacccatcccctccctgtgtccctggcccttggcacccatttatcttttatgcatctctgcaggtatgttatttcaatgaacgtcatgtaaatggaattgtgcactatacattctttttctttttctttctttcttttttttttttgagacagagtcttgttctgtcacccaggctggagtgtagaggcatgagcatggctcactgcaatctccacctcccaggcacaagcaatcctcccacctcaccctcctgggtacctgggaccacaggtgcacaccatctcgcctggctatatgcttcttttgagattgcttttttcactcacataatttgcttgaaatttatccaccagcattaaaaaaaaattaattgtgcatcatcttcagtgagatgtgtgcattttgtctttgttcatgccttttccactgcctagaatgccctctaccaaccctctctaccaatctgtattcatttccttcagtgtgtctcactgctgtgtgcctaaacccatctgacttatttctcttcccttatcaattatgtatatttcccataccatatcattttccacttgcaggtaggaggcagggaccacgcccatcttatctttatattcccagcatctagtacagtgcctgaaatggaggaggtacccagtaaataatgttttggatgaatgaatgattgaagttgctctgctggattcttatattgtgtcttgggtatgtgtcgtcttcccaactgcactcgaagctacgttgtaaacttgagagcagcagctccattccatttactagtataggcgaggtcccagttagggttgccgtagatgtttgtatgtggcttcagtgagcgtgtgtctttgtgtacgtgggggtgaagtgaaggcgtgtttgtgggctggtttcccagctgcccagcctgactttctacagtcagcaggatggacctggagatgtcagggctgaagaccctggagcatgtggcagtgacagtctccatcactcacccacggcgcggcagcttggagctgaagctgttctgccccagwggcatgatgtccctcatcggcgccccccgcagcatggactcgtatgtacacccgcccgaggcctgagcaaccttttcagcaagggcctttccagggaaaagaaatggaagaagtggatcctggcactgtcctaaactactgtggcactggctatccctggcggctggaagcctttcgtcacataccttcttcaagcgctaggccctgcacctcacatacatgttctctaatccttctaagaaccccctagattagactttgtaacctccttttacaaatgaggaaactggctgggtgtggtggctcacacctrtaatcccagcactttgggaggtcaaggcaggagaatcacttgaagccaggagttcaagaccagcctgggcaacaaartgagaccctrtctctacaaaaaaatttaaagattagccttccakgcctrtagtcccagctactcaggagactgaggtgggaggatcacttgaacccaggaagtcaaggctgcagtgagctgtgatcatgccactgcactccagcttggataacagagtgagaccctgtctccaaaaaaaaaaagaaagaaaaagaaaacaagtcatggagctagtaagtgcccaagagaacaagaataaacctagatccgtgggactccaagcctgtgcgcgctccatgcttgctttttccaccacaccacgttaacacaakttcctccttccatgagaccccaggggmaaggggcacctgagaagccctcgtggcaccctcccaggttgtttccacggctactacagtaagaaagtgttgctgggggaaggtcagctctctggcccacgccttccacctgtttctgctgtgttctttcctcagggatcccaacggcttcaatgactggaccttctccactgtgcgatgctggggggagagagcccgagggacctacaggcttgtcatcagggatgtcggtgagtctcgtgccctcacaccaggccctacctttcctgcttgttatctggtccctctgcatctcagagtccccacagaaagtgtcccgtgtgcaatatatagggttgccattggaccaagagagttgatgccaagagtgtgcccatccgtgaaatgggcattgctctctgcaactgttcatttatactacctctcatattccctggaggagtgacccatccatctttcctcaggatagcaacaaaaagtccttgtcgaaaccacatttcaagtccttttacgtataaccatccttcggcmagccccggtaggcaggtaagggcaggactcatttcaccattttttttaaactggcccagaggtttgaggtgacttgtggaaggtcaccatatcagtgaaggccacaatatccatgaattgtgaatatctttagtatcagcctatagactggaaattgagctccaccctcccatcctccagtcagttaggtattctctaggccagtggttttcaaagctttctttaatttggtggaaagacatttttttctaatcccagctgaacccccaaaatacgggagagaaaagcaagactctgctttggagtacagcctttcaaccctttccatccctaagggcacccagtgaggcccttctgcagaacctggggtcagtgggacacagtgaggcagctcctggagcagaccatgtggcctgagcccctttgggtggcagggcgggcagggcctctgctgtctggcatggctgacagaggggcgtggctcacgagctgccccttgctgccctaggggatgagtcattccaggtcggcatcctccggcaatggcagctgaccctatatggctctgtgtggagtgcagtagacatcagggacagacaaaggtgggtaaagccgcatgtgtcagagggaaggccagtcacaggggaagggccgcctagggagcccatcgccctctgaaccccagctgtgcttcccagttccagcgtcaagccggtagatggagccccgggctgggaactcacagtctgggcctctcctttttgctgtggggcttccctgtcttcacctgtaaggcaggaaaatgggtgagggcagatggtataggaaccatagtcagtggggcatcctcacctcttttcttctccacaggctgttagagagtgccatgagtggaaaatacctgcacgatgacttcgccctgccctgcccaccggggctgaaaattcctgaggaagatggttacaccatcacccccaacaccctcaaggtactagggccaagactcaagctgcgggtagatgggactgtcctgtctgggggatggagttcttagtgtgtttctcagggtgacctgcggggtgaaggactgggaagacctgggtcccagcagtggtttcatagcattgctcctaccctgctagcctaactcttacaggacaggccttgtcgggggagggggcagagggaacagtttgggtgaaaaaggcagtccctagaaggaaaaagactttctgagctcattgtcctgggctgagaaaggctgtaggcttcgggaaacagtgcctcacgtaggtgcttgcctcggccccagaccctggtgctggtaggctgtttcaccgtcttctggactgtttactacatgctggaagtatatttgagccagaggaatgtggcttccaatcaagtttgtaggagtggaccctgccactggccccatcggagccggaaagccaaggaggaagggacagagctagaatcagtgccactttgcagcagcaaggatccagaygaagtggaaacagagagcaggggccctcccaccacctctgacctccttgccccagacctgctggagcaaggggactggagcctgtcccagaacaagagcgccctggactgccctcatcagcacctagacgtaccgcacgggaaggaggagyagatctgctgacctcagggcctgacagtgtgggacaggctcttctttcccaaaattagggagctcttgacagaaagcagttctgatgcttacatctggaatctgaggcatcctctgactccactcaaagagggtgagggccttcttaagatacaaatggyggaggattgctgccagagaagtctggtcagagccacagggtctgcctccagccaaacgggagcttttggtgagaaggtgttggacaggggattggcgccccctttgggttggcctccatcctctttttttttccccttaacactatccgcctggaaatgggctgcctctctttttttttttttttttttttgagacatagtctcgatctgtcccccaggctggagtgcagtggcgtgatcttgggcaagcttttgtgttctgtgtcattttttttttttttttgagatggagtctcactctgtcgcccaggctggagtgcagtggcgtgatctcggtttactgcaagctccgcctcccgggttcgtgccattctcctgcctcagcctccagagtagctgggactacaggcacccgccacaacgcctggctaattttttgtattttttagtagagacggggtttcaccgtgttagccaggacagtctcaatctcctcttgatctgacctcttgatctgcccaccttggcctcccaaagtgctggaattacttgcgtgagccactgcgcccgggcgcctctttttttttgaggtgaagtttcgctcttcttgcttaggctggagagcaatggtggatctcggctcactgcaacttttgccttccaggttcaaacgattctcctgcctcaacctccgaagtagctgggattacaggcatgtgccaccacgcccagctaatgttgtatttttagaacagacgtagtttctccatgttggtcaggctggtctcaaactctggacctcaggtgatccgccagccttggcctcccaaagtgctgggattacaggtgtgagccaccgctcctggccgggctgcctctttaataccatcatttgagttctctaaacgtgaattctttctaagaaaaccctcagaacaacaaatatttactgagcacctacaggtatgccgtatactgtgtgagcagctccaagagaattccaaggtaaattcgcaatgtaaacatcattttatatgaggacaaaattatcttggattatatatgcctaaagtaatacacacttagtgccacttgacagcacaagttacttgaaaaattacttgacatacaatattaaacagatcaacaagacagaaggttaacaaggatatccaggacttgaactcagctctgcaccaagcagacctaatagacatctacagaactctccaccccaaatcaacagaatatacactcttctcagcaccacatcacacttattctaaaatggaccacataattggaggtaaagcactcttcagcaaatgtaaaataacataaatcacaacaaactgtctctcagaccacagtgcaatcaaattagaactcaggattaagaaactcactcaaaaccgcacaattacatggaaactgaacaacctgctcctgaatgactactgggtaaataataaaatgaaggcagaaataatgatgttctttgaaagcaatgagaacaaagacacaacataccagaatctctgggacatatttaaagcagtgcatagagggaaatttacagcactaaatgcccacaagagaaggcaggaaagatctaaaatcaacaccctaacatcacaattaaaagaactagagaagcaagagcaaatacattcaaaagctagcagaaggcaagaaataactaagatcagagcagaactgaaggagatagagacacaaaaaacccttcaaaaaatcaatgaatccaggagctggtgttttgaaaagatcaacaaaattgatagaccgctggcaagactaataaagaagaaaagagagaataatcaaatagatgcaataaaagatgataaaggggatatcaccaccaatcccacaaaaatacaaactaccgccagagaatgatataaacacctctacgcaaataaactagaaaatctagaagaaatggataaattcctggacacatacaacttcccaagactaaaccaggaagaagttgaatctctgaatagaccaataacaggctctgaaattgagacaataattaatagcctaccaaccaaaaaaaaatccaggaccagacagattcacagccgaattctattagagctacaaagaggagctggtaccattccttctgaaactattccaatcaatagaaaaaaagagactccctaactcattttatgaggccagcatcatcctgatactaatgcccggcagagacataacaaaaaagagaattttaggccaatacgcctgatgaacattgatgtgaaaattctcaataaaatactggcaaaccgaatccagtggcacatcaaaaagcttatccaccacaatcaagttgggttcatccctgggatgcaaggctggttcaacatacacaaattgataaacgtaatccatcacataaacaaaaccaatgacaaaaaccacatgattatatcaatgcagaaaaggccttcgacaaaattcagcagcccttcatgctaaaagctcgcaataaactaggtattgatggaacgtatctcaaaatagtaagagctatttatgacaaacccacagccaatatcatactgaatgggcaaaaacgggaagcattccctttgaaaaccagcacaagacaaggatgccctctctcaccactcctattcaacatagtgttggaggttctggccagggcaatcaggcaagagaaagaaataaagggtattcaattaggaaaagaggaagtcatattttccctgtttgcagatgacatgattgtatatttagaaaaccccattgtctcagcccaagatctccttaagctgataagcaacttcagcaaagtctcaggatacaaaatcaatgtgcaaaaatcacaagcactcctatacaccaataacagacaataacagagagccaaatcatgagtgaactcccattcacaattgctacaaagagaataaaatacctaggaatccaacttacaagggatgtgaaggacctcgtcaaggagaactacaaaccactgctcagtgaaataaaagaggacacaaacaaatggaagaacattccatgctcatggataggaagaatcagtattgtgaaaatggccatactgcccaaggtaatttatagattcaatgccatccccatcaagctaccaaagactttcttcacagaattggaaaaaactactttaaacttcatatggaaccaaaaaagagcccgcattgccaagacaatcctaagcaaaaagaacaaagctggaggcaccacgctacctgacttcaaactatactacaaggctacagtaaccaaaacggcatggtactagcaccaaaacagatatatagaccaacagaacagaacagaggcctcagaaataacaccacacatctacaaccatctgctctttgacaaattgacaaaaacaagaaatggggaaaggattccctatttaataaatggtgccaggaaaactggctagccatatgtagaaagctgaaactggatcccttccttacaccttatacaaaaattaattcaagatggagtaaagacttaaatgttagacctaaaaccataaaaaccctagaagaaaacataggcaataccattcaggacataggcatgggcaaagacttcctgactaaaacaccacaagcaatggcaacaaaagccagaatagacaaatgggatataattaaactaaagagcttctgcatggcaaaagaaactaccatcagagcgaacaggcaacctacagaatgggagaaaatttttgcaatctacccatctgacaaagggctaatatccagaatctacaaagaacttaaacaaatttacaagaaaaaaaacaaacaaccccatcaaaaagtgggcaaaggatatgaacagacacttctcaaaagaagacatttatgcaaccaacagacacatgaaaaaatgctcatcatcactggtcatcagagaaatgcaaatcaaaaccacaatgagataccatctcatgccagttagaatggcgatcattaaaaagtcaggaaacaacagatgctggagaggatgtggagaaagaggaacacttttacactgttggagggagtgtaaattaattcaaccattgtgaaagacagtgtggcgattcctcaaggatctagaactagaaataccatttgacccagccatcccattactgggtatatacccaaaggattataaatcatgctgctataaagatacatgcacacgtatgtttattgtggcactattcacaatagcaaagacttggaaccaacccaaatgtccatcaatgatagactggattaagaaaatgtggcacatatacaccacgaaatactatgcagctgtaaaaaggatgagttcatatcctttgcagggacatggacgaaactggaaaccatcattctcagcaaactatcacaaggacagaaaaccaaacaccgcatgttctcataggtgggaattgaacactgagaacacttggacaaagggcggggaacatcacacacgggggcctgtcggggactgcggggctgggggagggatagcattaggagaaatacggaatgtaaatgacgagttgatgggtgcagcaaaccaacatggcacacgtatacctatgtaacaaacctgcacgttgtgcacatgtaccctagaacttgaataaaaaaaaaaaaaaaagaaagaaaaattacttgacatatcttgacattttaggctcccaggattttacagtattcttaacaggttttgtcagcaaaatcaacccccacccccgcatcagtttaagagccctggaaggctctgcctattcaccagcatagagctgagatccttaaagggccagttcagggcactgctccagcaaccgttgcgctgctataagcttgagcacatctcttgcccctcctctctacttttatagatcctgcatttatttagcatataatcttttcaatattgactttgtatatgtatgtcttcccctaaactggatgtatcttttaaggaaaagcctggggttcgtcatccccctatgtatcacctttacaggcggtcacccaaaatctccacattcatcatagaaacagaaattccactaataaatgtcaggtactgcctccttaaccttggtccgctatttccctcccactttcagcagtctggtttattccatgggtggaagaggaagccaagttggctgagtgtgaagggaatggcgtcagtgtgacttcacgccacatcgtcccgaatgccagctccacactgcggtggcacgaacgcaggattgagagatgcagctggagtaaagagagaagcccatgtccctcagacgccacacaaaatgggggtaaccgcgagaacaaagcagggtacccaactgggtgtggcgggacacctgggcgcacgccgccagcgcccgggagagcgaaggcggggagagaggaaccacgctgaggcgtggcaggatgggggcgggacttccggaagccatttggctgagtggcaggggaaccggaagtggaggagctgctgctggtgctggggccggaggagggacgcgccggagcgggaccgacgggaccgagcgagcgaccgacgcgccacccgccgacgcctcagccgcttggggcccgcacggaccctctacttcagtgagtgcatccagggtcgcagggaaccggtggcttagaggcgggggtcggaaggggctgtgaggtgttattgtgagaggcccgcgacctcccctcccccacccttgcggcccctccccccacgccgccccatccacttggggggggcctcgcgagcgcgcgccttctctgcgggcccagcgtcggcttcccagcagccggcgcagctagttttcgctctgagagccctttcccgatattccataccgaaagctggcgtttctcctcagccgccggccggcgcctccacggcctttcccaggagggtagcgcggcgggcgccccgccccgccctgccctgccctgccctgccgggcccacccgcggtaggccttgcgcaccccagctcgccccggctgggcgctgcagctcctgcccgggtctccgctgctgccttttcc

SEQ ID NO: 97453 - DNA, 52410 bp, Homo sapiens
tttatgttataaagctgtttttatgttataacataaagatatctttatttctctatttcaataggattttggggaacaggttacggtatttggttacatgaaaaagttctacggtggtgatttgtgagattttggtgcactcatcacctgagcagtgcgcactgtaccctatgtgtagtcttttatccctcaccactccccaccctttcccctgagtccccaaagtccaatgtatcactcctatacttttgcatccccatagcttagctcccacatgagtaagaacatgtgatgtttggttttctattcctgagttacctcacttagaaaaatagtctccaattttatccagattgctacaaatgtaattatttcattcctttttatggcgagtagtatttcatggtatacacacacacaccatattttctttcttcactcgtcgattgatgggcatttgggctggtttcatatttttgcaattgcaaattgtgctgctataaagatgcatatgcaattatcttttttatataatgacttattttcctctgggtagatacctagtagtgggattgctggatcaaacagtagatctatttctttaaggaatctccacactgttttccatagcggttgtactagtttacattcccacgaacagtgtaaaaatgttttcccttttcaccacattcatgccaatatctattatttttcaatttttgcaggaatgaggtggtattgcattgtggttttgatttgcatttccctgatgattagtgatgttgagcatgtttccatatgcttgttggccatttatagatgttcttttgtgaattgtctattcatgtccttagctcacttttttgtgggattttttttcttgctgattcgtttgagttctttctagattgtggatattagtcctttgtcagatgtaaaaattgtgaagattttctcccactctgtgggttttctgtttactctgcttattgtttcttttgctgtgcagaaactttttagtttaattaagtcccacctatttatcattgtttttgttgtatttgctgttgggtttttggtcataaagtctttgcctaagccaatgtcaagaagggtttttccaatgttgtcttctagactttttatggcttcaggccttatatttaagtctttgatccttcttgagttgatttttgtataaggtgagagatgaggatccagtttcattctcctacatgtggtttgccaattactccagcaccatttgttgaatacagtgtcctttcctcacattgtgtttttgtttgccttgtcaaagatcagtttgttgtaagtatttggctttatttctgggttctctattctgttccacgggtctatgtgccaccaataccatgctgttttgttgactgtgaccttatagtatactttgaaatcaggtattgtgatgtctccaactttgttctttttgcttagtcttgttttggctatgtaggctcttttttgattccatatgaattttaggattgttttttctagttctgtgaagaatgatggtggtattttgatgggaattgtattgaatttgtagattgcttttggcagtatggtcattttcacaatggtgattctacccttctatgagcatgggatgtgtttccatttgtttgtgacatctatgattcctttcagcagtgttttgttgttttccttgtaaaggcttttacatccttggttaagtacattcctaagaattttatttttttttttgcagttattgtgaaaggggttgaattgttgatttgattctcagcttagtcactgttggtgaatagcagagctactaattagtatacattaattttgtatcttgaaactttgctgaattcatttaccagttctaggagctttttggatgagtctttagggttttctaggcatatgattgtatcatcagcaaacagcaggagtttgactttctctttactgatttggatgccctttatttctttctcttgtctgattgctctggctaggacttccagtaccatgttgaatagaagtgatgaaagtggacatccttgtcttgttccagttctcacagggaatgctttcaacttttccccattcaatataatgttggctgtgggtttgtcatagatggcttttattaccttaaggtaatatgccgattttgctgagtgtcttaatcacaaagggatgctggattttgtcaaatgctttttctgtgtctattcagatagtcatgagaattttttttttttttttgagatggagtctcactctgtccccaggctggagtgcagtggcatgatcttggctcactgcaacctccacctcccgggttcaagtgattcttctgcctcagcctcccaagtaactgagactacaggcacgtgccaccacacccagctaatttttgtatttttagtagagacggggtttcaccatgttggccaggatggtctcgatctctttacctcataatccacctacctcagcctcccaaagtgctgagattacaggcatgagccaccacgcctggcctaatttttgtttttaattctgtttatatgatgtatcacatttattgacttatgtatgttaaaccatccctgcatttctatttccaggcagctggtgaccaggactgagaacttgtcccaggccacgagcctccccattgagaaggcaagcagactcacagttttttggcatctcagggatgctgcagcagtgacctagttctttcaaagggtctgtggattctcttgactttcctgatatgttcctgcagtagttctgggagccaaagttcacaatgtgagtctccacatgctgctctgtctgtctaagtggaagctacaaactagtcttgcttcctatctgccattttcactcaatcacgccaagatgtctttataacataaagatgcaaggagaaacagcaagtgctaatgaagaagctgcagcaggttatccagaagatttaattaagatcattgatgaaggtggctacactaaacaagattttcaatgtagacgaaatagcctcctgttggaagaagataccatctaagattttcatagctatagtggagaagtcaatgtttcaaaacttcaagggaaaggctgactctcttgttaggggttaatgctgctggtgacttaatgttgaagccagcgctcacttaccattctgaaaattctagggcccttaagtatttgggtaaatcgactctgcctgtgctctataaatggaacagcaaagcctggatgacagcacatctgattgtagcacgatttattaaatatttgaaacccactgttgagacctactgctcagaaaaaaagattcctttaaaatgttactgctcgttgacaattcatctggtcacccaagagctctgatggtgatataaaagctgatgaatgctgttttcatgcctgtttatgcctgctaacataacattcattccacagtcatggatcaaagactaatttcaactttcaaggtcttattacttaaggaatacatttcgtaaggctactgctgtcatagatagtgatttctctaatgtaactgggcaaagtaaattgaaaatcttctggaaagggattcatcattctattgccattaagaacatttgggattcatggaaagaggtcaaaatgtcaacattaacaggagtttggaagaagtcaatttcaatactcatggatgggttcaagttttcagtggagaaagaaactgaagttgtggtggaaatagcaggagaactagaaataaaagtgaaccctgaagatgtgactgaattgctgcaatatcatggtcaaacttgaatagatgatgatgtggtttggctctctgtccctacccaaatcttaccttgaattgttatactccccagtgtcatgggagggacccagtgggggtaattgaatcatgggggtagttttccccatactgttcttgtgatagtgagtgagttctcacgagatctgatggttttataaggggctcttcctttcgctgtgccactcttctcatttctggtgccttgtgaagaaggtgctttgcttccccttcaccttctgtcctggttgtgggtttcccaaggcctctccagtcatgctgaaccgtaagtcaactaaacctctttcccttataaattacccagtcttgggaggttctttatagcagtatgaaaaatggactaatacagatgaagagttgcttcttatggatgagaaaaaaagaggtttttcctggtgaagatgttgtgaacattgtttaaatgacaaccaagaatttagaatattacatatacttagctgacaaatcactagcagggcttaagagaattgactccagttttgaaagttctactgtggataaaatgctattggatagcattgcatgcctcagagaaatctttactgaaaggatgagtcaattgatgtgtaaactcagtgttttattttaagaaaatgccactgctatttcaacttcagcagttaccactctgttcagttaacagccatcaacatggagtcaaaaccctctatcagcaaaaagattacaacttgctgaaggcccaggtgtttgttagtaatttttagcaataaagtatttttaattaaggtatgttcatggtttattattagacaaaatgctattgcacacttaatagactatagtatagtgtaaatataactttttatacactgggaaacaaaacaattcaagtgactcactctattgtaatattcactttattggggtggtctgggactgaacctgcaatatctctgaagtatgcctttgacattaatattaatcttctatgggccaggcactttgacctcatgaagttggccttgtctcccaattcgtgcattttcggagcaatgtcacttccttactctgagatctctctggtactactttttgtcatttctctctgcttcttcttaaactcagttttttgaacccggaatcaacaacatcaaaaattcctagattttactgtatttttttgctgtgggaaattgtctgacactcagtcaaaacacaggtatttactcaggacctgctggctgctggtcagcactggatgagaggttctgcaggattacacatgaacagcacatcacagttcctaacatgaatgaacatataagctatttggaaagaaaagatgatagagaacaacagaagatgttctgtaatggatggataaaacgtatcactggctccagtacaggtagaccccagagatgaagtttgaggctagaagtggcaaaagaccattgtaggcaagatccagggttggggtttggcattgtgtgcatagtgggggcaaaaaaggcagtcctgtgtggttgaccctgtggccaaggctgagagagatgatttgtatgatcaagagaggctgatggactatgtgaagtgtatatcttatctcaatcacccaacactttatattgaaagtgaggatatcacacaagtaaattttgtttgtgtttatataacttggcacttatgttttcaatatcatgttgtaaaataaatgtctttaaaattagactaattaccgccaccctccagtcatcagcacagcttctgctgtggagatgtgcaagttgggaaataaacgaaacatcattatgtccatattgcccgctttatgattttattaagtttaggtgagaaactttgcctgttagagtaaaacctatgacattcatgtatttttaatctgcctttttttccagaaataactttttaaactgcataatatacaaccattacagaagaaattagaaacaacagataagtaaataaagaataatcccctatcatcttggcaccaagagatacaagatgttcacattttattttaaaactggcagatttcttttgtgaatacaatacatttaaattggttcttgtctaatacatttccaatctatccaggagyggtggatgattggataaactacttcagagcagaagagtatttaatgaactattcacagagaagatgaaacacagtgaactggtaagacactttgaagatcactcagtacaaatgggaaatgaaaccaatttttattttatgcaatgcagtgctttgggaaaacataaatatttttcaccattatagaaagcagattttttttcagtgcaaaacagacactttataaatgtgtcaaaagtgtcatgtgtgatatactatttcatattttgtgatagcagagaattattagtaagaaaaaaagtggtggtgagggggttagccaagatggctgactagtagcagctacgttgtgccaatctaagagaaatagaaggggtgagtaaatacagcacattgtacttccggtacaatgtgtacaccggaagcatccaggtacacacattgggattcatcaaggaaacaatttgactcatgaagaatggagaaaagcaaggcagggtaactgcccacctaggagtgccatggaaccaggggagcctcccttgcctagagaagtgttgactgaatgaggaagtgactgcagagacccactgttctaccacagatctttgcaaccctcaggtcaggagatcccttcatggacccactctacccaaaccttcagtttgacatgcagagctacataatgtctctgcagagtagccactcaggcacatgtggagccctgggagccttagatatccagcttcctgtcaaaaagtagctgcagctctttcaaagtgagaggttagatcctcgtacctacccrtaggaaaggggctgaatccaggggagtgagcagcgatggactacaggcacctcactggataagacccaccggcttgggaacccagccagtcaccaataataaccgttacacctccctgagatgaagctcccagagggyggggtgggccacatctttgttgttttacagccttagcaattgttgcctttggactctaggagtctgaagtgactggaggctggagcggacccccagtccagcatagcagctctgcaaagcagcagccgactgcttttcatgtggatcccaaatcccatttctcttcactgggtagaatctcctgaccaggacctcctgtcacccccactggtgttttctggctgacagcagttccaacccctccctgagatgtagctcccagagggaggggcaggccaccatctttgctctttagcagccttagctgccttcaggcattagagtccatggtgaccaggggmtgtagtggatccccagaaaagcacaactatcttgaggaaaagcagccaggctgcttttttacatgggtccctgatcctatacctccttactgggtgggatctcctgattggggtctccaaccacttcttgcaggtgtgttcaggttggtaacaggtccgacctccctgggatggagctcccagagggaggggcaggccacctttttgctgttttgcagccttcactgttgatatctttagatactggaaaattcaargccactggggactggagtggacccccagcatactgcagcagccctgtggaaaagtggccagactgttatgtggtccccartcgtgtagctcctcactgggcaggtcctcttggcttgggtctccaactaccctctgctgaggctatagagccaatagcagctctgtaactccctgggcagagctccccatggtaggggcaggttgccatggtggctgtcttgcagcccttgcccttggtgtctccaggctctggagagtctgtgaggatcagggactggtccagatccccagcacagagcaacaaccccatggaaaaatggtcagattgttccccatacaggtcccagtcctcacttctcactgggcagggctatccaacccccaacacaaccaccctgaccctgcctgatcacttcaatcagagccagctcagcacttctcccaggaggaaatcgcagagccaacccacaaaccctccttcgctgcagctgcagtggtacagttccaacagccctcgtgcttgggaaggaacaaggggcttagtcattatgctggcacttccagcacaccacagccacgctatagagaggagcccagcccctcttccaggggaatccccaccccacactcttcaccaggcagggcccctggctcatgactgcagaacagccactccacccatggctgaacatatccactggtagtggcctgaggagaggcttgtagagacatgttacagccccttcgtcactggttctatccctgctgccctcagtctgaagaagaaacaaagaacctgagggctacatctgagcttacagcatgccacagtcatatggagaggaaaccagtctctcctcccagtgaaccattgaccccctgctgccaaacaagcagagccccaagctcatgtgccagcactgcacctgcccctccccactggctgaacactcccaataagagcagctctgcttcacagaggtggaacccccaggggcaaccaaaagcctctctgccactgcctctgcagtggtattacccctgccactctcagagtaacaaaggcagaagcagtggcagagaggctttggttgcccctgggggttccacctacaagaaagatggagtgcaggaaagggaactccaggcttgggcccacagcacagacccatcctaggctgattgcactgagcgattgctgacctgcatttctctggggtggagcccctaggatacaaataaaagaccatcggctacaaccactgctaaggttccttcctctgctgcctctaagttggggaggaaacataaaccttgagttcaccccagagctctggtggacagcctgggagtgccaagccgcaatttacagccagcgctcaagtggaagaggggcccttgatttcagagcattgagagggaacatggctgcaactgtgaggaaatacaggggaaccacacaactgagcaagagcctaccaactgaccactatgcctaagcgccacctactggatcataccccaaagcttcaacaccaaaaatgtctaggtaacatactcccctgtaaaaccaaagacaagaagttagccacaaataaaaaccctgcacaaagcttcagccctgtgaaaacatccagaaaagaagtctattgactatactcaatctacgctgcagttaaaggaacacccacatgcagagatgagaaagaaggcaatacaagaactccagtaactcaatggccagagtgccatatgtcctccaaatgaccacactaattttccaacaaggattcttaaccagactgatctggctgaaatgacaaaaatagaattcrgaatataggaaaaacaaagataattaaaattaaaattcaggaggatggcaaaccccaatccaaggaaaataagaaccacaataaaactatacaggagctgacagacaaaatagccagcataaaaaagaacctaactgatctgacagagctgaaaaacacactacaagaatttcacaatgcagttgcaagtgttaacagcagaatacaccaagctgaggaaagaatctcagaactttttttttttgagacggagtctcgttctgtcgcccaggccggactgcggactgcagtggcgcaatctcggctcactgcaagctccacttcccgggttcacgccattctcctgcctcagcctcccgagtagctgggactacaggcacccgccaccgcgcccggctaattttttgtatttttagtagagacggggtttcaccttgttagccaggatggtctcgatctcctgacctcatgatccacccgcctcggcctcccaaagtgctgggattacaggcgtgagccaccgcgcccggccagaatctcagaacttgaagactggttctctgaaataggacagtcaggcaaaaattaaaagaaaataaaaaggaattaataaacctccaagaaatgtgggattatgtaaacatgccaaatataaaaatgattggcatcctgaaaagggatggggaggaagcagacaacatggaaaacatatttcaggatatcatccatgaaaatgtccccaacctcactatagaggctgagagtcaaattctggaaatacagagagccttgcaagattctatacaagaagatcatccccaaaaaacacagtcagattttccaaggttgaaatgaaaaaatgttaaaggcagctagagagaaagagcatgtcacctacaaagggaaccccatcaggctaacagcagacctctcagcagaaacactacaagccagtagagattgggggcctatattcaacattcttaaggaaaaaataatcttcaaccaagcatattatatccagccaaactaagcttcttctaagtaaaaaagaaagaagaaccttttcagataagcaaatgctgagggagttcattgccaccagatgtgtctaagaagagatcttgaaaggagcactaaatatggaaaagaaagaccattaccagccaatagaaaaacacacttaaggacacagaccaatgacactatacagcaaccacacaaacaagctggcacaataaccagataacaacacaatgacaagatcaaattcacacatatcagtactaaccttgaaggtaaacaggctaaatgccccatttaaaaggctcagaatggtcagctggataataaagcaaaacccagatatgctgtcttcaagagacccatctcatacacgatgacacccataggctcaaaataaagggatagaggaaaatataccaagcaaatggaaaccagcaaaaagcatgagttgtaatcttaatttcaggcaaaacagactttaaaccaacaaaaatcaaaacagacaaagaagggcattacgtaatcataaagggttcaattcaacaagaagacttaactatcctaaatatatatgcacccaatacaggagcactcagattcaaaaagcaagttcttagaggcctacaaagagacttagacttccacacaataatagtggaaaacttccttactccactgacagtatcagatagatcattgaggcagaaaattaacaacaacatttcaggacctggactcaatattggaccaatggatctgatagacctttacagaactctgtacccaaaaacaaaatatacacttttctcatcaccacatggcacatattctaaaactggccacacagttggacataaaacaatcctcagcaaatgcaaagaaactgaaataataccaaacacactctcagaccacagtacaaaatagaagtaaagacttaaaaataaatcactcaaaaccatgcaattacatggaaattaacctkctcctaaacaagttttgggtaaataatgaaattaagtgagaaatcaagaaattctttgaaactaatgagaacaaagataccagaatctctgggacacagctaaagcagcgttaagagggaaatttatatcactgaatgcccatatcaaaaagttagaaagatctcaaattaacaacstaccattacaactaaataactagagaagcaagaacaaaccaatcccaaaactagcagaagagaagaaataatgaaaatcggagctgaactgaaggagattgagacacaaaaaaacattcaaaggatcatcaaatccaagagtaggctttttgaaaaaatttaataagatyggccactagctagattaataaagaagaaaagagaggaggtccaaataaacataattagaaatgacaaaggggatattaccacgaccccacaaaaatacaaatwaycatcagagactgctacaaacacctccatgcacaccaactagaaagcytagaagagatttataaattcctggacacatacaccctcctaaaactgaaccaggaagaagttgattccctgagcagaccaataacaagtcccaaaattgaatctgtaataaacagcctactaaccaaaaaagcccaggaccagacagatccacagccaaattctaccagatgtagaaagaagtctggtactgttcctactaaaactattccaaaatattgaggaggaagaattcctccctaactcattctgtgaggccagtatcaccctgataccaaaacttaccagagatccaacaaaaaaaaggaaatttcaggccaatatgcctaatgaacacggatgtaaaaatcctcaacaaaatacttgcaaaccgattctagcagcacaccaaaaacctaaaccaccatgatcaagtaggctttatcctagggatgcaaggttggtttaacctatgcaaattaatgtgattcatcacataaacagagctaaagacaaaatccacatgattatctcgatacagaaaagggttttgataaaattcaacatcccttaaaacctctcaatkaattaaatattgtaagaacatacctcaatataataagagccatctatgacaaacctacagccaacatcatactgagttagcaaaagctggaagtattcccattgaaaatcrgcacaagacaagaygccctctctcactactgttattaaacatagcattgtaagtcctggccagaacaattaggcaagagaaagaaataaagcacatccaaatagaaagagggaaagtcaaactattcctttttgcagactacatgattctatgtctagaaaaccccatagtctcagtctgaatgctccttcagctgatamcttcagcaaagtctcaggatacaaaattaatgcacaaaaatcactaacatttctatacaccgacaacaacctaactcagagccaaatcagaaaggcaatcccattcgcaattgccacaaaaggaataaaatactgaggaatacggctaaccagggaggtgaaaggtctctgcaatgagaatgacaaaacactgctcaaagaaatcagagatgacacaaacaaatggaaaaacatctcatgctcatggataagaataataaataaaatagtcatactgcccaaagcaatttacaaattcaataacattcttcacagaactagaaaaaactattttaaaattcatatggaaccaaaataagcctgaatagccaaggcaatcctaagcaaaaagaacaaagctgatagtatcttgttacccaacttcaagctatactacagggctacagtaactaaaacagcatggtactgttacaaaaacagaaatgtagataaatggaacagaatagtgagcccagatataagaacacacacctatgaccatctgatctttgacaaagctgacaagaaaaagcaatggggaaagactccctattcaataaatggtgcctggataacagggtaatcatataaagaatactgaaatgggaccccttctttwtaccatatacaaaaaaatcaattcaagatgaattgaagacttaaatgttaaacccaaaattataaaacccctggaagacaatggaataggcaataccattcagggcataggaactggcaaagatttcatgaaggcaccagaattaattgcaacaaaagcaaaaattgaaaaatggaatctaattaaacttaagagcatttgcaaagaaattatcarcagagtaaacagccagcctacagaaggggagaaaacatttkcaaactgtgcatctgacaaagttctaacattcagcatcaataaggaacttaaatttaaaagaaaaaaacaaccccattaaaaagtgggccaargacatgaacagtcacttttcagaataagatgtacatgtgaccaacaagcatatgaaaaaaagttcaacattactgatcattagaaaaatgcaaatcaaaaccacaacaagatactgtctcacaccagtcaggatagctattattaaaaagtcaagaaataacagatgctggtgaggttgcagagaagaaaaaaacacatatacactgttagtggaggtgtaagttatttcaaccattgtggaaagcagtgtggcaattcctcaaagagctaaaaacagaactactatttgacccagcaatctcattactgagtatatacccaaagaaataaaaatcattctatcatggagatacatgcatgcatatgttcattgcagcactgttcacaatagtgaagacatagagtcaacctaaatgaccatcgaygacagactggataaaggaaatgtgatacatatacaccatggaataccatgcaatcatataaaagaataagatcatgtcctttgaagaaacatggatgaagccggagaccattttccttagcaaactaatgcaggaacagaaaaccaaatgccacattctcacttataagtgggagctaaatgatgagaacacatggacacaaagaaggaaacaacagacactagtgcctagttgaaagtgaagagcaggagaaaagagawgatcagaaaaaataattattgagtactaggttttatacctggatgtcaaaataatctgtacaacaaacccttatgacatgagtttacctatataagaaacctgcacacatacccctaaaccctgaacctaaaataaaataaaagttaaaaaaaaaatagaaacttataaagatggcaacactacaccaaaatgcaaactgtgactcttggcccttctattcaaagctctataaatgttaggtgtcacttttctctcgttttaattgtgaatgcaagcaatcctagaagaataagtatcttcaatgatttatatagaaataggttacatcaacttcttatctctgaagaaagaaaccaaatgtaactcacttttttggagagtaaatgagtgaattgtttgtgcttgctttaatgaaaaagatgatcttattaggatcagaaaaaaaattcaagaagcattgagtgtcatcaatgaagaagccacatatggcaatagactagtagataattttggttattattgcgaagctatttttacatgagaagatgaatatggccaaatgagtttccccataaatgtccaatttacttctttttatgtaactaattttgtttatacttgcatgcctcttactgataatgagtcactaatagactggtttatgattctgataaattaatccccatgcatttgtgtagccagtttatctccaccctcacactccttttgtttttaagcggtggggaaaaaacctagtcatgtaaagaaaatcttttataattgttaaaatgtattatttatcaatagtgaagtaatgtgggtagtttttttatagtttttggcagatgattcacatttgtgctgtgtctaggttgacaaagaaacccactattaatgggcaagaagtgatacggtctagcggaataatacattttgaatgagacctgtggtctttccctgcttttcttcttttctctgggcctcagtttctatatttttaaatcaattaaaattgcctttattttgagcaaaagaaggtaatagccagggtaccattgatcarttgataaaaccacttcactgaaaattatttttctcttgtaattaactgttgacacttctatttgaatgcgtttccattctgcggttaaaagatatattagttggccgggygcggtggctcacgcctgtgatcccagcattttgggaggccaaggagggcagatcackaggtcaggagatcragaccatcctggctaacaaggtgagaccccgtctctactaaaaatacaaaaaattagccgggcgcggtggcgggcccctgtagtcccagctactcgggaggctgaggcaggagaatggcgtgaacccgggagacggagctttcagtgagccgagatcgccccactgcactccagcctgggcaacagagcgagactccgtctcaaaaaaaaaaaaaaaaaatatatatatatatatatatatatatatattagtcgaatttttttttctgttgtttctctccttctcctaacaaatcaaaggcacactactacatatgggtgaagcgctatgaacaagacgtattagttgagagattttctgtttgaatcaccagaattattcatttattcattcagcagatattagtatgcctaccatagacaagacatgatgccaggtactatgagtcttatcacgatgaaaaaggccaaaatgctatgtgtccagaaaaataagagatcatactttactgggtaagcctcaaagtcaaggaatactttacagagtaaaaggcatttgagctgtgccttagaataaggtgggtaagatttttaacaagtgcagtgtgcccatggggaggcctttctaggacggaggaagagcatagacaaatgcatcagtgctggaaagcagtgagcttggcttgcagcccttgctgcaatgtttyggttgtaaagcagcaggttgaaaatctttctctctcttcctcacgctaatcaggaggtctagtctgactgaaattttgagtgcacgtagaacaatgtaggcttaggcctaagcataaggccagattattgaatgccttaaatgttggcagtccaaagagtttagaaagatgtctacctgtccatgtgagatttctccttacattctgagtttgaaaacagtatactgtgttaaaccagatgcatgagctaatctaattatacatatttttgagatttgtctttagatcttctaaacttattttaggtttgcaaaaagaccatacaaagaaatgtaatatgcaaatatgagtaatttcagcaaatcttatacaatttgaaattaaatttccatcttttgctcgtattcatggcagtcatgctgagaaatatcactaatgattttaatgaatgaattcttttaataaaaaatgaatacatcttttaaattaaaaaaaagaacataaattttttgaatggccaaattgttcaggatattcaataaggcaagaatacttctattcagaaagagcatatcactgtgggtgttcaagctgcattaatgtccaacaaaaaacgtgaaggattttctaaaataacaaatgtctgacaatttattttctgcctatttggatgattatgacctctagacaaatatttttacttcaacattccctgatgtttgtgtagaaatagcctccagtgtcataacagtgacaaacgtaatcttactaacgtggaaacacttaatagatagattatatcaaataaccatattccagtatagtggtgagaataaaatatgaaaaaatagtctacgccaggcaaagtggctcacgcctgtagtcccaacactttgggaggctgaggcagttggtttgcttgagcccagcagtttgagaccagttggcaacatggcgaaaccccatctctacaaaaattaactgggcatggtggcatgcgcctgtggtcccaactactcaggaggctgaggtgggaagatcacttgtgcccaggaggtcaatgctgcagtgagccatgatcgtgccactgcactccagcctgggcaacagagcttgaccctataataacaaaaaaaaaagaggccaggcacggtggctcacgcctgtaatcccagaactttgggaggccgaggcgggtgaatcaygaggtcaggagatcaagaccatcctggccaaaatggttaaaccctgtctctactaaaaatacaaaaattagctgggcgtggtggcacatgcctgtagtcccagctattcgggaggctgaggcaggagaatcacttgaacctaggaggcagaggttgcagtgagccaagatcacgttactgcactcccacctggtgacagagcaagactcagtcttaaaaaaaaaaaaagtctcggcttggcattccagcagtattttctttatttttaatgacattagttaaatcacaaaatttcctattttccagttttgaaaagcacaatttttcttgagatgtttatgattctttacagtattttgaatatgtgtgcttttctccaaaacaattcccracattaatctaatttctagaattctctctctcctgtaatcaatacttttctattgcattagtgttagcctagaggaccttgtaatgaaaacacttattttagggttatttattacctagatgacaatataaaaattatgtcagattgtttccatatgtcatagctaacgcaaggcttaatgggaaatcaaaattgtgttttgtatataacactgagctctgaactcaaagcaatgggctaaattagttaattcagtcaaacactttggttttgtatcttaatgcatggtgaaatttatgtttagtaacaaatctattggagtcttttgtatcgagctcacagttcagtaagcaattagatccttgtaaatcttatatgtatattttgttataaataaagtgttctcctaytgacttcatgcaattcagtttttttccttcaaaattaacattcgtagagatttacttagayatctcccttcccaaataaatgaggttagtagatgasaaaggtaatcaaatgtgatctggtgaagtcttcatgttggagctgaaatcacacctgacgttggtgttcagagaatgccaaagccatcygagtaaggcaaaggagatctaatgaggctggcaagtaaaaaaaatgaaagtagtgttaaaggaaccaaatcctatgagtctatatcatcttctctcaacattataataattttgaaactgaaaaaactgaaataggactatatttgatgacattatagtattttagatctgtaaggtaactttgagatgttgtaatccaattttgataaaaaattgcttaaggtaaaaaatataaaggtgtagccaagaaccttaatttccagtacattatccatgagtcaaaaatattgttgagcacattttatgttccaggctctatttkagattgtatgggcacatgaaaaacttggagtctctgctggcaagatgcttacatgctagaggaggtacatatgtagttgttttttwaaaaagtaaacgtatgagactggacatggtgtctcaggcctgtaatcccagcactttgggaggctgmggtgggtggatcacttgaggtcaggagttccagaccagcctggccaatatrgcaaaattttgtctctactaaaaatacaaaaattagtcaggcgtggtggcatgtgcccatagtcccagctactcaggaggctgaggcatgagactcatttgaacccaggaagcaaaggtttcagtgagctgagatcatgccactgcactccagcctgggtgacagagtgagactctgtctcaaaaaataaaaataatttttaaaagtaaacatatgagatatgctaggtaccaatatgtgctataaagaagataaaataaggttaatgcagtagacagtgactgctttagctggtgtgtttggccaaagaccttaaggtgacmtaggaaatccaatgtggatgataaatggggctggatgagcttggaggcgtggcaaatagtttggattttattctaggtggaggattttccgcaagggagtgagacattctaatagacacttttgaaagattaatcaacggctagatggaagatggacctaaggggtcaagggcagtggtgcagggataaaagcctattgcaatggtataggtgagagaagaggcatcttggactattagagcagkggagatggtgagaaatggacattttsaggatataatatggatattgagccggtgaacctataatagatataagagacagaaagaaatagatgataaagactagatttttggctcatcaactgaatatctgaggatggcacttatttaggtgtgaaggtgtattagtccattttcacactactatgaagaactacctgagactgggtagcttgtatagaaaagaggtttaattgactcacagttccacatgactggggaagcctcaggaaacttgcaatcatggcggaaggggaagcaaggcacatcttaccatggtggagcaggagagagagagtgaagagggaagtgccacacttttaaatcatcagatctcatgagaactcactatcacaagaacagcaagggagatattcatccccatgatccaatcacctctcaccagaccccccttctgacatgtggcgattacaattcaaggtgagatttgggtggggacacagagccagaccatatcagaaggcttgatagcagaatggttttagtgggcgggtaggaagcaagtgattaaagacttctgttttggccatgctctttgaagtgtctattagacaccagatagtttgttgtatataagaatctttctgactgctgcagtttttgctggattccagtgggaagttgcatcagattagaagatttatagaacattatggtaatgagcatctgtatgatgatgaatgacctgggaatcttggacttctgatagtggctgacatagcttaggatataaattaagacatattgatcctgcaagtcagagcatacaatagatgtagatgctggtccttacttggcttgcttccactgagacagtttaatgataygcaactgtatatgatgtcgagatttatctttagctttttctttttcataaaaaattttaataaccagttttaaaatcattttcgtggttaatctttctaaaatgaaactttggaagaattattttgtcaaagtttattctgtacccatgagttcaatacttcaataataaacaccacccaggagttgtgtcttagtgcacaygaatacaacaatataaattgtaaattgttggttctttcattaaagaggccaaataaagctaaaatatcctaaggagtcacttattttttttctttacttgtagatatcaggtacaaggtacccagtcactgggtatctagattctagtgagaatgccatcttccctaactttaatttacacccattgggaaggggaggtgctctgcttttggagggcagagcaaggtccgagaatgtacaaatagacttgggtaagttctttcaagtcttactactcatccttcattcatctcctggatcattgcccagagaatgaaagaaattgccagtcaagccagccaggtaggttaaatctatcctggcagtcctggagactgctgcagactgactgcctgatgtccgtgcccactggggtttttcccttttcagaaaggatttctccctgatctctccccacaaactctggctttgctttttcatttcctaagagcaactcaatatgcatttccccatccaagctaccttccactattcccctactgattctctctgtcatttatatttttcactcttctcttcctttctctgctctacccttgcccctttgttgtcaatgagtaactgctaaatgtgaatgattcttctaagttttatcaaccaggactttctcccacccaagcatttgtttgtggctcacaggcatttcatcccatagtagattaacaccagttctatgacaacctgctctgatagtccccagtccttgcccctgttatttttcatttcttcctcattgactctccatagactcttcgcttatattttacttttcatattttatcatttgagccttgtgttattaagtaaatgtccacctgccattccagtttgtaaagttcttgccaattagagttcacrtgctgttcatttttgcatccttcagcacacctagccaagcacagcactcataatagatgtttaacaaatgttcattgtgaatgagctcatggaccaacttaaattctatgtcttctggaaaaactcagttccaatactgcaacccacattgatcctatttttgtattctcctagtacttcatgtctgcattagtcaattctttgtttttaacctaatcatatgttctcttccattatcatttagctgtttcacattgtgtaaaccttttttccctcattttattgtaaacatacagagagctcataaccagcctcttcggggactgatgcagtgtattttccacagaaattgttcaataaataygtgttgcatggaagaatgaattaattaatgcatgatttgaagaatgaataaacacactcctgtctttttatctactgtgcagcttcctgatcctgtaggcatgaatgcttagtgtcacctaattctttgcttttcctccactttccaaatcaaaccagtcacaatatgttattgattcttgcctttcagtgcctcttaatccattctgagtgtaataagaaattttacccatcctccttcaaacataaaggtaagcaaaaatcagttataaattataaaactagcccgtagctattacctatatgataaacacatctggcagacaggttggtgggtttcattcaatgtattttagccttttctctttgataatttctccttgtaaagtgtaagactatagaacagaatctctttctgcctttaagcagctcattcacagatttataagataccatttaaagtcaggtgtattagtctgttttcatgctgctataaagaactacctgagactgggtaatttataaagaaaagaggtttaatggactcacagttccacaggtttaacaggaagcattactggggggcctcaggaaacttacaatcatggcggagagcaaaagggaagcaagcacgtcttatgcttgacagagtgagcgaggggggaagtgccatacttttaaaccatcagatctcatgagaactcactcactatcatgagaacagcatgggggaaatccgcccccataatccagtcacttcccaccagatgcctcccctgacacatgaggattacaatttgacatgagatttgggtggggacacagagccaaaccatatcgtgtagttggaaatcagtgttaaagaaggataatgtagcatttaaacaatgttcacattggttttatttatttttatactttagtttaataaaagaattgttggttttttcctagatgcacaggtacaggcctaggtggaatttccatttagcagaggaaatggcccttgtggctactttcgatgaaaagcaacatgacacttgatgaataaggagtcagccacacacctagccccatgagtaaccaattaggaaactaattacaggcaaatgctgtgccccatttagataagaagagtggattgccacatttccaaagtatgaggaacacaaggtataactaaacagatttttaggtaaataaatttgagcagttttggttcaattgcaatataatcattagtagttttaaataatcatgactcttgctatgtagctatgagtttactcatccctaattgttgactggctgtatattattgctgggatgaaaaggaaattctcaagctgcaattaataactgcagtacacatctgagacaatttgtatctacgataaacacgtatttgtatgtatatttctaaaaatgtcctcttactcaattcaaatttgctatttctttcaatggattatatcagtttacagtatcaatttgacttaatagagatgagaagacataggtctttagatgttctccattagttagattgctccttcattttgtgaaagtttcacagtctaccgggtctgtataaatgacagccgaagggagattcaggcaggtagggagagaacatcctagtgatgactaactgggttttagaaagagagcatacttctgagtaattgttccaagggaattttaattaaagtaaattagtgtgaccagctaaatcttgctaggtagtayacagctgagctggaaaatgatatagagaagtttatttgctccagacagaaatattttaaaggcatcgggtaaatatataaactaataatgttaattttgcttcaaaaagcagttctagacaattcaataaatatttcattcttttgctgatacaataaaggccaactatcccatcttatgagagtccagcttctaatttcaactgaggttataatgcttctgtacctaatggagtartatcctccctgagattcataaaacctaaataggaattccttgagtcctctacaaaatgtaaataaagctgaggcccaaagagtaatgaggctgtagtgacagcccttgccacagtactccttctaggatgccaatcagcaaagggacaagtatggcaggaaggacacctagtcagtgggctagtcgggcctcatttgatatacgaagggtaatctgtaggctcatatgaactcttggcctcattcataagtgttggctctacaaaggcttttctaggcctgggtttctgctataaaatacaagacatgaaacttgaagtaaacttaagaagtaatatatttatttccataaaatgaggaagtagtacagaaagaccccttgagggcccatccaggtcagtaccatttccacgccctgaaatgcctccctcagggacaccaccccttggaaacacagagaataaggaatgcagtgcaagtgtatggaacaggataaagagatgtgaggtcactccccagccacagtcatctactctggctctcataggtacttcaggttttctgctaagcaggcacaaaggggtttcattttgaagaattatcccactattttttacagtgatgaaggaaggataggaagtcctttagaagggactccaggagctgtaccaaactctgaaaatactgatgattaagccacatggggtcatctcttctgagcctccatacagaagtgaagggtgacaattaaataagaaaagtgtgacgatagaggtctgcagatatgaatctgtgtgttgggggacccaggaatggggctcaaaatgaagcctcagaggctgcaataggtaagcaatgtttcctcagacacaataggtacacctaatgtacaattgttctggtgggcatgtgtccagcatgcccacatagccagctgggtctcatcttttgcaaaatatggccctctggccaggtggatcaggcatgagcagagagactatggctgaacttgackgctccttgacagatccctcaccctctttatggtccaaagctgcccagtctccagagccacaaaaccagccttagtttaatgttgcctagaggggtcatagtccaacttttttaacttcattggcattcttttcccagttgtacattcatatcttttagaccatttctcaaagcacattttgcaaaatatcagcatgctaattacctctgaagtaattgtttaaaattccatttgggaattgttgctcaagaacagtagtagtcaactccggctscacatgagaatcacaggggaaaaatatttttaatagcaattatctgggcctcataccaaaagacactggtttgattggtctgggttattctaggcatctgaatgtgctggaagctccccacagtgacttgagtgagttagagtctcttccaacgaacaggtgtatgtctggaggcaggtgggygggatgaggccacctgaggcctgttggtaatcaggaagaaagtctccaatgcacacggagtacctattaaaaagactataggatggttcctgagcctggattccatcctgctgtgctttcagagggctgctctctctccttcctttccagaaaagggggccttcacaatttcattcctctaatagattctcacaattcagtgtgcataaaagtcatctgatggaattttactaacatgccaattcccagacgttatcccagaaattttgatttagtagcactgggaaggtgctggaatatatattttagcaattactatatgattttgatgaaagtggttgagggaccatctttgaggmaacactgcctaagccttcgccaaggtataatctgctacccttgggaatgttccctgtcttaaattttggatctagcacctagtgtctggccctgggtataatcattaacctttctgtgcctcaatttccacacctgtaaaataaatgaaataaaagtgctttatagaggttgtgaggattaaaagaaattaagatagaggtcatggtaatggcctgaggtaaccaggtgatagatctgggtagcttagggaatacgtgtgtktgtgtgtgtgtgtgtgtgtgtgtgtgtgtgtgtgttttgagacagtcttgctctgttacccaggctggagtgcagtggcacgatctcggctcactgcaacctctgcctccggattcaagcgattcttgtgcctcagactcccaagcagctgagattagaggcgtgcgccaccatgcctggctaattgtttttgtatttttagtagagatggggtttcgtcatgttggccaggctggtctcacagccctggccttaagtgatccacctgcctcggcctcccaaagcgctgggattacaggcttgagccacygcaccaggctgggaatacatctttcttttcggttggcgctggtcctctagtaaggcagtagcttaatcatttacrtgtcctctttctatctcagccttcccaccacacttccccactcaaggctcactccagacattgttagaagaaattttccttctatccatgtgatktgttgtaaagaaagactaaaaagtatccaaattgtactttataaacaatttcctatagtggagattgatactcaatgtatgaaggtcaaatgatgaagatgtaccattaagcctcatcagactctattagttaatttcagtcagcaagtgacaactgcacattttaaaacctagatctgtgatgacacccagtggccaaaatgtcaaccactgaaattttaaaaatacatcaagtattttcatcagcatacaaataatattgcatcaactttaaattttgagagctattcaataacaaagcatgaaaaggttctacactgggaatgtcaccaatgaaatgtggacaaaccaactttctttagtactgtatttagtagaactttcccaaccagttcaggcagataaaagcaccaggttatcaaaggtgacacattcctaaaaaaaaaaaaaaaaaaaaaaaaaaaagcttttaaacttggaaaaagtaatttgcatcagtatatagcaaagaaccaatgaccaaatgcaggagagtacaacagagattattaagacttcacacatggtcctttaaataattagaaaatcattaacatgcttagcttggcaattcagataacagtaattactttagccagtacccatcccaaaaggtacaggatattttggacattctttcacttgctcattcaaaaatatttcctggtgtcctgggttgagaagcaggcttggggagggagattaatgtccatgatgtttgtgaaggcaggctcctgggatcgcacttgtagatggaaaacgaaggaggaggattgtggagagagagaggagatggttcctatacagcctcggttgactcacagagagcgctgaagctagcctggcctctcagctgttgtccattcttggggtaatgaagcagggcttttatcctctgcctccatccagtcactggatgtgggctactcccagaaagggagtaaccttaggtgaggcagcgctgaagaggcctgacagctgaggcttgtctactgacaacactcccagcagctgagggggataagacctccaggctcaagggtgagctctacggcccaacacagcgtccaccacactgacgcaatatgatgccgacaaaataaacaggcttttcgatcttctgtaacttgaaggtaagtattaagccaatgaacacttcgatatatacttaaggctgtgaaggaagagagggctttaagagaagaaagggcaggggttgggggaaggagaggagggctaacgcctggctgtctgctggtttcataatcagggcggagtggcaggaaggatacaaaagagaactataacacttggactgggaattgtttaccttattctgtgggcagcatggagtcactgagacttttacaaagggmacagaaagcataaagtagacaagtaaagtggtagtggaatagattggattcgaaggaaattaagcatttcaaagtcaacacaggaatcaagcattttcttttgaaggtcatctccaatttggtcctgtgtttstggtctcatttcttaccattaccttgtagatcctttcaggcctatacagataacgacctcttccattatctgaacacaaacgttaactccattttttttgatattgtcctttgacaccaatgaaattttctagtttaagatccagctcaaatttcacctccacttgaaaagatttttctgcttcaagccctttaagggtctctctctacccttattttcaggataaagcaaaaatgtcttaatgtaactcacaaaaaccagtacaatctggcctctgtttattcacctcgccagactcatatcatcccattcccctatatttgtttgccgaggtggtgagcttgtgccttatttggctttttattaggttggggcaaaagtaattgtggtttttgccattaaccacaatcacatttgcaccaacctaacaatttcaggaaatgtaataatctttgacatgctaaatgctattcattgttaaattgagaaaaggtaaacaatcttcacaaataaaattacttacttttgatagctcttccccttcaatgaatcatggtttaatacagagtattggctgggtgcagtggctcatgcctctgctcccagctcttcaggaggccaaggcggatggatggctccagcacaggagttcaagaccagcctggtaatgtagtgagacctcatctctacaaataaatacatacataataataaagaatatttcttttctaagttcactgatgtactaagaaatttaagacttctgcactataatttgtagccaatcatccccagagccttaaatgctcatgttaatcataaatatgatatatgtttcttctatgtgaaatatttcttctaagtaaaacattagtacatttgcatctgtagaattagaagggacaattaaaagggacaatagagatcatctattataagcgcctcagattatagtcaaataaactggcttgtgggtgttaaatgtcttgaaaagcataccttagctagttcgtgacaatgttgaagctagaaactaagttcatttattgccaataataataaacatttagaggccctacacgagccaggtactcctctagacatgctatatatattatctcattgaatcttcacaatcctgtgaggtgatactgttattatcttcaattagagcaaagaagcttagccacggaaaggttggctaaacttgtccaaattccaaaatgcaaaataattagaataaaaaccctcaaaaagatctttctcttttcaccttctcaaatttccaaacccagatgtatcaacatatataatgcattaaaaattaaactccttccattagaaagtagactccatcttctgaccccttgatctgagctggatggtcagtaacttgactcactttgaccagtaaaattgaggctgaagtaacattgtgtgacttctggggaagttatcaaaaagtgttgcagcatccaatctcaccttccagctgctcagagactgtcacgttaagacacttaaactagtttccttaaagttgaaagactgcaagaagagaacagcccagacaccagtagatatatgtgagggaaattgacttggactgttcatcgattcccaccatcaactgactgcaaccacagagtgagaccatgaaaacaactctacttaccttagcccaaattgttgatccacagaattatgaaaaagtagttattttttcaagtaaacgtgctttgaagctatttgttatatagtaattgataattgacagagcatatgatactgtcgtttgatcgatttaccatggaatttctcttcctatcattttgtttttaacttttctgagtctttaaatttaaagtaggtttgtggtagccagcacacaggtaagtctagtttttttttttaatttaattcaacctgacagtctctggtgtgtttagaacattcatatttaaagggattattgatatagttgcattaaaatttaccatctttgtaattgttttctgttcattgcatttgttctttatttctttctcctgctgtttttctgacttctctggggttaattaagcattttgtatgatttgattttatatctttacttggtatatcatatatcttttataaaaaatttagtaatatccctagggtttacaatatatattttaaaataagtccaccttcaaataacattatataactttataagactactcccgattcattcctcccattccttgtgacattggtgtcaattatttcacttgtccatatgctatagtcaccctatacattgttactattattactttaaatagctatcttttagatcaattaaaaatattattttaatttcacttgttccttttctaatgcttttctttgtataatttttgacctatatcatttttttttctctctgaagaatatctttaacatttttgcagggcaggtctgctggcaatgaaatccctcagttttctccacaaaaggctttatttttcaccgttgaaggaaaattttgctgaatatagaaatataggttgacagggtttgtttcagcatttcaaagatttcacctcactcttcttgctcacgtgtttctgaagccaaatctgatataatctgtatccttacttctggtttgtttttttttttttctccttctggcttccttcaagattttctttgtctttgatttgctgcagtttgaatatgaaatgcctggttgtaggattttatttttaattgtttgttttggacttctctgagcttcctggatttgtagtttgatgataccgttattatcttcaattagagccaggaagcttagccacagaaaggttggctttggtgtttgtcattagttttgggagttcttagccatgtattatttcaaatatttcttctgtcctgttctatttcttatgcttctggtattcagttataccttttgatattggcccacagttcttgcatattgtattcttttttaaaatttattttccttctgtttttcagtttgggaacttttaaaattgagcaatattctggccgggcgcagtggctcacgcctgtaacccagcactttgggaggccgaggcgggtggatcacgaggtcaggagttcgagaccagctgaccaacatggtgaaaccccgtctctactaaaaatacaaaaattagccaggcatggtggtgcgtgcctgtaatcccagttacttgggaggctgaggcaggagaatcacttgaacctgggaggtggaggttgcagtgagccaagatcacgccactgcactccagcctgggcaacagagtgagaccccgtttcagaaaaaaaaaaaaaaaatttgaccaatattcaagtttacctattctttccttagctatctcaagtctactgataaaccaccaaaaggcattcctcatttctgctactgtttctttgatttctagcatttccttttgattctttctcatagtttctgtctgtattgacattatctrtctgattttgcatgttgtgtacttttttccatccctttttttattaatcrtagtgtaactgtgtaccctcatttttctaagagatagttttttactatctttcttcttctcgctctccttcttttccccacttcctacttaggtctttagaaatgcagttatagcctttacctcctcttcaccagacactccctagagggcaagtttatttaactaggttgttagaagctccagagtgaaactctcctaccaggaggctgcctaaagaaacaacagtccatctactacctaaagtatttccactgtgaaactctctcccacctggagaattttctgctgcttttacaacctagtcttgtccacaaagggaccagcagttaccagcttgaccacccggtagataaggcaccgaggctagtatgcagaccccccacctgctcactgactcctctgcatgtcattcatgccagcatgctgggccccctttaaaagcaccccactttctgctccaaaagtgaggtggtacccataaagacaagatcctgctcctcttcccctaagcaagctttggaataaaatgtcactttctttataccttgctcctsttaattggagtgactggacttgtgttttggttacaaaatgtggagtggggagtgactggacttgtgttttggttacaatttttgtggctcatatggggaagtacttcatgccctgggtgagctaactttgtcagcccagtttcactaccaggtgaggtgtggggtcacctgtgagtgccagctgctcatggctagcagaccccataatgggaacattaggaaacttcccagaagctgccaaaaatgaatttgttttgggggaagctcccttttgcctcatggcatgacaactgctgcctttggtgcttcactggtacaagcaaaatggcctcttaagacgctgacaaactttgaaactgagtgagtagttggagtgtacccaaactgggtggccttgccctatttaagacttggctcttttggggtgtcgctggggccgtgctatatatatattatttttttttttgagatggagtcttgctcagctgcccaggctggagtgcagtggcccagtctcggctcactgcaaccaccatctcccaggttcaagcgattctcccgtctcagcctcccaagtagctgggattacaggcacccgccatcatgccccactaatttttgtattttagaagagatagggtttctccatgttgatcaggctggtcttgaactcctracctcaggtgatccrcccaccttggcctcccaaagtgctgggattacaggcatgagccaccgcgcctggcccaaggccctactgtatttaagacctggctgctagtgatagcatttgagcattttatgcatttgtatttatttgaatatgaagttccataggaacktggctcagactcagcttcctgtggagccatttggaactggggcgggggattcaggacctcacccagacccttgactggggactcatttggaagcacaccatttgcatgtgtgaatgaatgactttttgtatgggccctattgcctttctttgctctctacctcccatttcaccctcctgactatctcggagasctgcccacctagggtgctgagactctccctgataaatgagaagggcggscctggtgcccccacactgtgtaatggttggaaggttcccaaggttccatctggtcactttacctttttttttcttctcctcctttctttctcacaccccacttgtgaaacctggctcccatgcccagtacgaacttcaccggggcataggcctggctcctgtgcaggctgtctttccctctctcttcttttctccctactttaaatatgctgttactaagctgctggtgctgagataggactcatgtggtctaactagaatgtaaacgttggaaactgttttgaaactgagggaagaaaagatgagtttgggtttttttcttcttttttataaggaaggggtttcttttggagccaggagctgtgcaaccacctggggttaggggagcggggatgccagaactcctttagccgccccagctggtgtctagtaggtcacgtgcccctccagtccactgtcccttgaccgagtccagcactaggactctcctaggtgttgaagtccttgtggcctcaactgtctttcacgtttatttagagcctcagaacactttagctcgtggtggcaaggcttgtaggaactcagggtctgacagttgggatcagtgatttccctctggctagggctggtttaaatgctccctccatagacaggcatcagctgaatttgctctgatttttttctttctgctataacagggcagcactgagttcaatgccttacaattggaatgctctccctcccccaggactcagagacactctttgccccacactgctgctgccacagtgggtcggggcagggggcaaggggtggcatcggtgattcaagagtgttttttctacctgttcagttcctctttcagtgatacaaagttaaaaccaggtactgtgagtgctcacctgatgctagaggctttaaggtcataaaatacttttatgagttataataataatttgacttgcctgttttacagctattggattctaggtaaggtctagggacatactgagttaggtaggttccctacctaggctggaagagtcagacagttgtctgcagctctgtcccttgtcctgggctttacaatccaatatatggttaaaattacttacttaccagatttttcacaaaaaataaaagttgctgagagttaacattgtaacatgttaattgagactactggagaaacagtttcatacgcaagatatacaaggaaagtagaatgtggttttggtaaaaggttataagaaggcatataagtatgatatggtttttgctaaagggaatgtaattttgtctaattccgaggtttttaaggattggcctaagctaaaagaacgatagaacaaaactgaaaatttaaacaaattgtgaaagatttgtgagagattaatcttggaaaagaagttctacaagtgtgagaaagctggctaaaatttgaaagggattatttagtttttccataaatcaaacattaaaataaaagcacactgatgcaggaccagaatctgggcccatgtgtctgaataataaggctttcttagaaagttgatctgctctttaacacaacattgtaaaggattataaaaaatttatgaaaattttaccttatggtcaaattaattaagattggatagatttgtttataargttttattgaaaattgggtttaacattaatagtacactaatgcaaaggtgaaatttggctttctcttttgaataaatttttgtgtaatattaaaaagtaataaaaaatrttttgtttgccttttgaataaatgacagaaaaaagaaaggaaagaagagacagattcagttggcctcatactgtctttattgggttttatttgaaaagctgtctatcctctatcaataagtaaagatttttcccttttacttatagtgacatgagattttattttgtaataccaagtgtttaaacctttgatatttgataaactttcaaaagtcaaattctaaattaagttcttttttttttttttaacctgtttaaccttttcagatatcaggtcccttaaagtctaaaagagacatatttggcttatttggtatataaaaaccatacaggaaacattgtcaaatataaaatggtgtttacagttctttgagttatagtcatataaacatgttttgagcatgtgttccaaaattgtataagattcctgtaattctgatatgtcttaacatatgttatcagtaataattatgattgttatgctaaattactatgtgccacatagccaggtttccttgttgattgtgtctttgtggctattctgagagttttgtcatccataattgttattttactctgattcttttcaaaggtggttttataaccagctataggacactgacaggtgctcttgaaggcaggtttctaataactggagattttgacattagaataaagaaaaaaaaacttccaaaactcccataaaaagctaatgcatttatgcatatcaaacagaacaggaataarttacatagactgaactaatggaagactgaaataatctttatgacactttgtttgaaacactgctaattctttgatttttcagagtccaaaaatcctttttccttttgagctatttacagcttttaatagttgagtaaagtacagtcctctgagcaaaattcggagaatttttctttgtttttacctgatttctccagaatttgaaaactatttgtaagtatacttaatttatggcagtatagttatctgcatatgttcaagaagaatctgttttcttctgtgaaaggacaccattggagacaccagttattttaccaaggctttgactgaaagggcatacttccaggtataaatagactgctttaaggaatcaaagttgacttatacagccaattaaagcctcttggaaaaaaactggcctcataccttgtccatgcagtccctgcacaggatttcctgacctgtagtaagtaagaatgtcactttgtgacacgcccaagagccccaaattatcttgagacctcaagaagaggaattcacccaattcatacaagtatttgcaagtacagatgagtctgtggctgtgctcaaggttttaaaaggtcaatttaagatttcttataagtaaaaatttcagcaaagccagttttaaaaggagccaatatgacaaataattattcttgctgcactttctgcaaataatcaggccaagtataataagactaaaacttattttgcaaataaatttgtcctattatgatttgtctttagtataacaggaactggagagagaaaaaattatatttcagaaaaaactatagtacacctgttgtttgattctagttttgtcctttgttttagagtttttattattttctgcaatttggactaaatcctgaattctttctgggttacaggtccctaaacgaatgctttcaaattccttttccattttttttttaagacaaactctcactttgttacccaggctggagtaacaaagtgatctttggcgtgatcttggctcactgcaaactctacctcccaggttcaagcaattctcctacctcaacctcctgagtagctgggacaacaggtgagcaccaacgtacctagctaacttttgtatttttagtagagacagagtttcaccatgttggccaggctggtcttgaactcctgacctcaagtgatccacctgcctcagcctcccaaattgctgggattacaggtgtaagactgtgcctggccttycatttttctgatttggacttggtgaaatcactactaccttattcctcgtaatacaggagagaaaaatatgtcagcctgctaccgccctcctctgtaactaaagatgctttgagtctawcatctagataaattgtgcccaacattaacctttgtttttcttctgtttctatagaaatgcctcttattaaaaatatatttgccttcatcacatacagaggactaacccatctgcaatgccacctcctagatgagacacagctagctaactaaactgattcattctcagaaactagacaggatttatgatgactttcgtgaatattcacagctcttcctataatccgttgaacacatatttaaccaacctgttaacatatctggttataattggcagtggggaatctgcatgacaattaagactaaatgctacctaaagatccaagataatacaggaaatgtcttgatagcctgcaagacacaaaccaacaaatcaaagctatttctaaccccacatattgctagatcaatggttagcattcagtttcaggtcaggattgtcctggtggtggaagctacttatcagtttagccccggctgcaagaataggcatacttctctgctttggattttactactgttgcaccctgtgtagggaaatgcaagacaggatttttcatatactttccagacctcacactataatgttccaaccaatatcatctgtaaatccgggtactcatgaatatttccagttccaaatagatcagttccattctgatacacaatgactatgcccctttcagcaggaagcagccagaatgaatatggcacctaaatcccatagaaatgaaatggaacttggcagtggggaatcgtaacccaatactcccatttttcttttcttttttcttttctttyttttttttttttttttttttgagatggagcctagctctgtcgcccaggctggagtgcaatggcacgatctcggctcactgcaacttctgcctcccgggttcaagtgattgtcctgcctcagcctcccaagtagctgggattacaagcgcccaccaccacgcccagctaatttctatatttttagtagagatggggtttcactgtgttggtcaggctggtctggaactcctgacctcatgatscgcccaccttggcctcccaaagtgctgggattacgagcgtgagccaccacgcccagctatactcccatttttctaagagatagtttattttctcactctcttctctttcttccatttccccatttctctagttagctctttagaaatggaagtatagtctttacaaccacttcatcagatactccctacagggcacgttcatttaactatgtgctcagaagctcgagagcagaactctccaccaggaggctgcctcgaaaaacagtccatctacaawccaaagtgtgcctgctgcaaaactctctctcacctggagaattttcaaaagcttttactacctagatcttcccatgaaggggccagcagtcacctgctaaactgcccaggggtcaataagccgctgaaactaatacacacctgctccttctcctctggatgccattcatgctagcatgccaggccccctttaaaagcacttgctttctgctccaaaagcaaagcagtactcttaaaggcaagagcctatacttyttcccctaagcaagttttggagtaaaaagtcactttctttataccagaacttgcttttttaattggactctgcacgtggcaagtggccgaacctgtgttttggttaccatggcattttaaattgcctgcctgatagtaccagaatctgtgtcatatctgagtctgaacctgatgactgttttgtctcttcagaccctgctttttcttgtttttgatatatcttacaatttctgttgttattgttgttgaaaaccagatatattgcctatggtaataggtaccaagagaagtctttagtgtgaaaaattatattaatcttgcttggagttaaaatgcgatttaatctttcttatagctatagataccagagattgcaaattctttcagtgtccttgtttttggctttaagacttccttttgtatttttttccttagagaaaatctgtgtcttgtagcttttttggctgaaatccacttttattacattggagacttattggtgtagtgtatggtgtggaacagagggagcactctaaaatcatctgtgtcttggtcttttagtgggcttgtgtcttgggagatgaccttcgcaagtgtttcaatttctcctccaggggtatagtttttttttcccattgctccccattttccctggctgtggcattctcaatcaayttccttgccgccttctcccctgctgactatggatttttttgtcccttaggtgagacgggaaagtgggctggagttgagcagagttcagagttctcctagctaggtgagttttcagtattgccctctggggagaagtcctttctactggagacaagttctttgtgagggagaaggggctggcaggatttaacaatgactattctttacctcctcctaccagggccattggaagattattcttgaatcctcagaacctccctgtgagaacccactggtatttctggaaataccaatatttccagtatttccacgcctgccccctgcatgacagcaaccacgaggagtttctcactctcacattagaccatactcagggtctagcaattcatgaaaattactagttaagtgttcctatcagcttagggcatccaggagcttctgctggatgtgtggcaaaagtaagcaagtatcagatgctcttgtatctcactggatgtgcatmtctctccagatgggtggctgtttgccctgagtccttggttctctggtaggtccaaaagccattgatttttggacctaccaaaatccagtttttctggatgtaaggatgggacaaaatccagtttgtccagtttttctggatgtaaggatgggaatggcaacttctaagttccttacatattggagctgaacatgtgatattttcttgagtaagatttcctactgctaggaacacaggaagtagttgtaacagtgagaactgaattatctccttgtacttggcttggagtcattgaaacgaaacaaggactccaatatggtttatactcatacagagaaattgattttggaggtattttagcagaagttttttgaggaatgaattgttcatgctgataaaggtaggacttgagaataagctatgactggggtgaagaggcccacaataacttgtaggaacgacggctggaaatattaggttgtgaccaggctacagtgtttcgtttgaagtatgttttattctgtggtcatcagcatggagtcactaaaagatttcaaaaaggttaacaactagcaaaaatctgaacaagtaatctggtgacagtactgaataaattgaaaggacactgggttagtagtatcaaactcaagctttggtatctgaatagagataaaaaggagaaactgaaaagctgtaagattttaataatgataaaatcagcaacttgagggatgaagtccaggagcctggcctataatatgaagaatttgagatgtgactagaactcacaacagagtattggggttgaagattatatttgagtttcgtctgcatggagattgtcgctgaaaccttgaatagagrtgtgatacctgggaaagaacaagaagtggggttagaacctttgtggatgtgtaaatgcaaaggagtgggaaaaaataaacttaatagcaggaaaacyggaaggatgagagtaaaactaggacaagatgtaaagaaaattaataagccattaatttattttaatagctttaaaataaataaaccattaatttttgtttaatggtttaatttaaaataaaccattaatttaaagtttttaaaataaattggtggttttttttttttctccaacttatgtctgttctacrggggcatactctggagtacgcaaatccaacagtcctgacagaggaaagcagcttcctgtatagttgacstggaaggtcaacttcttgtcagagttttacatgaattatttttatggtggaaatagatgtaaatgttccaccaaaaatgatttttatcaggtaaatatccacatttatgagataatgctccactgttagaatctaatcaggtagaagagtgatttatgtcagctgtaaagttgtgacaataaccatatataatacaggcataccatgttttattgagctttgctttattgtacttcacagatactgtttattagaaattgaaggtttgtggcaactttgcatcaagcaagtctattggcacaatttgtccaacagcatttactgacttcatgtctttgtgtcacaatttagtaattctcacaatagttcaaactttttcattattattatatctgttatgatggtctgtgaatcygtgatctttcatgttactgttgtaattgttttgggggttgtgaactatgctcatagagacagaaaacttaatccataaatattgtgtgtgttctgactgctccaccaaccagctgctccctcatctytcttcctcttcttgggcctccctattccccgagacacaacaatattgaaattaggtcaattaataagcttacaatggcccctaagtactcaagtgaaaggaagagtcacacatcactcactgtaaatcaaaagctagcaataattaagcttagtgaggaaagcatgtcaaaagccaaaataggccraaagctgggcctcttgtgccaaatggtcagcaaagttttaaatacaaagaaaaagttatagaaggaaactcaaagtgctacttaagtgaacacacaaataataagaaagtcaaacagccttctttctgagatgaagacagttcaagtggtctggaaagaagatcaaacaggccacaagactaccttaagccaaagcctaatccagagcaaggccctaactcacttcaattctatgaaggctgagagagatggagaagctgcaggagaaaagcaggtagctagcagatgttggttcatgaggtttaaggaatgaagcatctccattacataaaaatgcaaggtgaaaagcagcaagtgctgttgtacaagctgcagcatgttayccagaagatctagctaagatgattgacgaaggtggctacactcaacaacagattttcagtgttgaccaaacagccttctgttggaagatgccatctaggattttcatagctagaaaaaagtcaatgtctggcttcaaatcttcaaaggacaggctgatccttttgttagaacgttaaagcagccatgattttacattgaagctgatcctcaataccattctaaaaaccctaggacccttaagaataatgctaaatctaccacgcctgtgcagtataaatgaaacagaaaagcctgggtgatagcacaactgtttataacatggtttacyggatattttaagccaactgttgaaacctactgctcagaaaaagagattccttcaaaatgttactgcttatgaacaatgcacctggtcacccacgtgttctgatggagatgtactagcagattcatgttgtttttcatgcctgctaatacaacatccattctgaagccatggatcaatgcataatttcaactttcaagtcttgttatttaaaaaatacagttctaggggtattgctgccatcaatagtgattgctctgttggaaataggtaaatcgaaaactttctggaaagtattcactattctagatgccattaagaacattcatgattctrggaggccaaggcgggtggatcacgaggtcaggagatcgagaccatcctggctaacatggtgaaaccccgtctctactgaaaataccaaaaatgagccgggtatggtggtgggcgcctgtagtcccagctacttgggaggctgaggcaggagaatggcgtgaacccaggaggtggagcttgcagtgagccaagattgcatcactgcactccagcctgggcgacagagcgagactccmtctcaaaacaaacaaacaaacaaaaaaacagaattcatgattcatagaaggaggtcaaaatatcaacattaatgagagtttggaagttgattccaaccctcatggatgactttgaggggctcaagatttcagtggaggaagtaactgtagatatggtataaatagtaagagaatgaagttagatgtggagcctgaagatgtaactgaatcactgcaatctcatgataaacttgaatggatgaggagttgcttcttacrgataagcaaaaaatgtggtttcatgagatagaatctactcttggtaaagatgctrtgaacacgaagtgacaaccaataatttagaaaattacataaatgtagctgataaagcagtggcttgagagaactgacttcaattttgaaagatgttcaattgtgagtaaaatgctatcaaacagcatcacacactagagagaaatctttcatgagtcamttgatgtggtaaacttcattgttgtcttattttaaggaactgtcacagccacctcaaccttcagcaaccaccactgttcaaggcaacatccttcagcagcagaaagattgactcgctgtaggctcaggtaattgttagcatttttaagcaatattttaaaattaaggtatatacaytgtttatctgggcataatgctactgcacacttaatagactacagtttactttaaacataacattttatgtacctggcatccaaaaaattcctatgactcgctttattgcaacggtctggaaccaaacccgtaatatctctaagatattcctgtatgcaaaattaccattatctctcaggggtaactgcaaataatttgcttcctccaaataaatacataatcttcataatatataaatttatttggatatttgtatttgtstatactgctgatccttgaacaacatgggtttgaattgtgtggtccacttttatgtgaatttttttaaccatgtgcagatcaaaaatacatgtgaatcatgcagtatatggagggcccactttttgtatatgtgggttcaacagtgttgactgtggtacttgagtatgcacagattttggtatatgtgggtggtcctggaaccaacccccacatagaccatatgctgttacgtatacatatgtgaagtacaatcagatgctctaccccggcatcgagtggcttgtttctcactaagattggttaatgtttaaaggaaagaaagaaaatgcatggtaaatttcttctagagcaacaaggcagttttcatcaagtttgagaaatgtagttttattaatagaaggkcatgtcttaccatacacactgtccccagataaataaaatcccaacatctttgaaagcacacaaacacacagttttacagggtacaatacaaagtgaactttgatgatgttcttacttgcatttactaaaaatctgagaaagactgtaatcagtctctaaataattatcttgcgtaaagagaaargtagagcacaatatatatatatcacaaaccaaatcacactctctgtaacattacaacatggaatttmcttaatcaaaaataaaagcaaactggctgaagaaggctgtatcatttttttctcaatattacgctaatttctatttttggcatgaattattaaccttttccattagtaggcaaatgtgctctgcaaattctcggatggcaccacggccaccattacatttgcaaatgtatccaacagccttctgggcagtagaacaggcatcagcaggagcgccacttaggcccactctcttcaagcactcttcatcagacacttcatttcctatcaagtaaaataaatactgagcaaacatttaaagagacaaagaatattctagctaaataatgcagacagcaaccaacaggtaactctggcaacttcagtaagacctaggggcactgcatataagaatactaaagattagatggaacaaaaatattttacagtataattgaggtccagggttttccctragcaatcaaaaataaactcttatgagctagagaagaagaatggagcataattgctacctgccatgcatattacaaatgttagaaattttatatatgaattctaagtaagttatttaaatttttcattaagcaaaatttcaaacatatgcgagaaccccaattttatattgaaaaattatcagaatttaaaatcacttagtaatattgttttctatgcactgccccctagtttatttggggaaagggagaagaaggaattcccagacataatattttatccaaaaactcttcaatatttatctctgataaatataattttttatctgacagaatatcattaaacccacaaaatcagtaatagttccttaatatcctctaataacctagtatatgttgagatacccccagctgtctcaaaattgtccttttatagctgacttatttgaatcaggaatgaaataaggttaacatatggtcttttgtttatatatatataatctcttaaatctcttttaatctgtaatggttctgattggtatgccatttattaatagttgctgaaaaattaccatttttaaagaataaaaatagatactaaatcatactgacataacgatatccttttcctccctctctgttaaccccttttttggaataggatgcatttcagaagctcccagtatctttaattcaccattctgagtaaaactattactatactttagaccacatacaatagtacaatcttggttgaagagagtttcttttacatttgttctatgcttatctactgaaattttctcatttattattaaatgtgttgaaatttgaatcgttttcactaaaataaaaaaagttagtatttgcataatccagcctttaagctctatttactaaattttacttataaaagtattgatttttttaagaaatatatttttatacacttatgtcacccatataaaacattggtgagtgagttattatttttttttttgtagacatggggcctcactatgtttcacaggctggtctaaaactcctgagctccagggatctgcctgcctccgcttcccaaagtggtgggattgtaggcatgagccatcatgcctggcctgctgtgagttttaaataaaaatgtaaatgctcttctccattttcttacctctccttttaaagtgtgtgtgtgtgtgttttttttttaatgtcatataagtaatacgtattcgtggtagaaatatttttttaaaaaatagaagcaaaaaagtcacaatcatcctaattatcactatttgtagataatcactacattttgacacatataattctagagttttacctatataagtgatacacttattactatctgtaggcactatgttaagcattttatattatctttgtttttctttctaatggctttataaaatttggtttgtgtttatattctaagtagaaaactaaggtatacagaagcttgcttaacatcccaaagaaagataataagtatagttggaatttgttatacattccactaaaattttcttctaataaaaattggatctgtctttaacaaacattctgcagcatttatgtccattaaatcttcatgtgtggtttaagggttattcctgaagtctctagatcacatgctcccaaagtttttcctgtgcttcttattttgaggctcatattacccttgtaaatactgctttcatacatgatttatagttattatgcatcttaataacttatcaattttaaaatgttgacatcatcagactgtaagctctgcaagcagaaagcctacagttcccacaaccagttccatgctgcgtatcatcataggtacctggtaagtaagtgtattgcttaatatccaagtgaaaaacattgttatatttgatcatgcaaataaatacaggtcacagcactgtttgtaatggttgcatagtaatcctttttagggatattctatttttcacaggacatttaagtgggttcttttaacttcactattggcccatttgtctcatttctttcctggaattggaatttggaggaaaaagtatgtacattcaattagcagcaaaaactattcagagtgtaattcatatgtactagaaattctgctaagtgctttactcatattattttattaatcccttccagagccctacggtaataggtactctcgatatctccagtttacagatgaggaaacaacattcatcttatcacaactggctaatcagtggtacagtctgacttcacagcttgtgctaataatcattctacatttgatacctattatcaaactaacctccagaaagactgtcccagtttaacagtttgatcagcagtgtttgttaaaagagttcctatttccctacaatcatacccatttggaggatgtgctttgtcatttctttaaaaataagtaaataattaattcctggtccattttactatgggtgaataaaaagataccaaccaagatatgccacttctttccagcacaggcccatttcttttctccattcatctacaactgctagcttgtctgatacactgacttccattttgcaatccagttttaaagaagacagcgtctgctttgaacaggccctttctgagattagcctcaccttaaaaaaaaaaaaaaaaggattggaggaagaagggaaaaattaaaaagtgaagaaaacagaaatctttcataataattgaccttgtagacagtccaaatcacaaacgagtcatcttttgactttctgaaggtccaagtaagaaaactgactgtcgaattaaaatcatgatgctttaaaacaaagctcattttatttctcatagcccaataaaggtgagacacagtattttattttctacaatagaaaggattctatctacaggtaaaaattacaacatatattgtctgatactactctaagattctcctataattcaatttatccagaggaaagtctataacctctctcttgtgctgcttagcaatacatatttaggatttctggtaaattataattatcttagctagctttcatttaaaaaaatacacttaaacgttaagttattttgaatcaaaaatgtcattcataagaataagctagattttaaaaatccacaggatatcgtccttttctaaaatggtacacctattatctagggaatctttcttgctgcaagatcctttgggaaacattagatagctcccatttaaaagtagttatgtttatatttactgaataaacaagaaatattatttgctgattaacaaattcctaattctactcatctaaaactaaatagtataataattttctaggcgtatgaaggccaaatttcagatattttaagagttaatactaaaaatttaaatctcttaattccttgcatgttctttgaccctgaatcaaaatattataaaatactgctatattcagggagcacatacctcaataccacttttctttaataaacttatcccaatagcatcttttacatcataagatattatttctttttggtctcctgatacataaatgtggccattggtgagacatccatcaatattgcaaaccaaaagttttatttccttaagcttctctttgccaaaatagccatatctaaaagaaaccaaaatagacctttgagtacaagtgcagtactaatcactccctctcatctggctaaaccaatacatgaaatgtcaccctccattcaattattcaaacattactctccaaatttacttcacatatatattttaacatatagtacagtaagtaaaagtagtgtggtctagccagataatgtttctcactttattgaagccatgtaaacacatattttacatgtcttcctcacatgaacaaagtaattacaaagatcctaagatgtctgaagtatcagaaatcagtatctagaaatataattattaagatttagtacaaaggttataaaggtttatttgtttttaccttaatactctttgctctgcaataggccaatcaatatccacatctatatccacactatgttcagctcgcatttcgtagtatgccatttttccaccctaaaggtagtataaatgtcatgaatactgtttttaatattcattcacatatatcaaaactttattataatacagaacaatgaattcatttctacagtactgagaaaaatgaataacccagtaaaaatcagtcacataaaaatgatttttaaatttatttttacttttttattttttcgagtcagggtttcactctgcctcccaggctggagtgcaatggtgcaatcatagctcattataaccttgaaatcttaggctcaagcaatcctcccacctcagcctcctaaggatctggtactacaggtatacagcaccatgtccggctaaatttttaaaaagttttttgtagatataagatcttgctatgttgccaaggctggtcttggaaacctggcctcaagctatcctcttgaggcctcaagctggcctctcaaagtgctgggatgacatgcttcagccaccacgcccagctttttttttttttttttttttttttttaaggagaaagctcacacaaaagaaataaccttaacatttttcaaattctatctaaacagttcaagttccctatttaagaaaatttctattttaatattgaaaaaagcagaaatattacatcctccaggtttctgaccacaagggattttgtggaaatcccttaatcatatcctcctttttttcaagaagtctctcctgtcatcatccaaaagcagtattaaggtttttggaacttctgttctaatttgcaactaacaggcaacacaggggaggaaaaataactgtagcatctgttgtacagagttttcttagatctctgagctactgatgaaaatgactaatagtcatccaagtcacatgcaggcaaaggcaagggcagtctcttgattctaggcaagggtcagcaagagaaagggtctttcttctgatagtaattatttgaatgacaagatcaattactggacaatttcaatttcattttttttttcagaattgtcagtctcttcataaaccttgttttaatgagaaacatttttctccacactttaggaatgggttaatcatggtcctccttagaaaaaagcttaaaaatggtagtatctatgtgtgtcaaatccaatttttctgaacacttaaatttaactaaacagctagtctatagtttgcctacacattgaccagaagatttgtaaaaatgtttttctctcttttgctcagaataatagtcccattagaatttttattacacaatggagaggtttctctctctctctttaaaaccgctatttcttgagtaacataagaacctgaatccaaatcctgacagtaccatttattagctgtttttgccttgagtcaattacttcatatttcagtgaggcagttttcctcctctgtaaaactgggtagaaatgtccacttcattcattcgctatgcagattacataagataacatatgcaaagtgtttcacctactccgaagtacacagtaaataataaataataatgataactaaaattaacaagttaagaaatatatgatgcaaccatgttgcaggctctaaaatgagagagacattaaatctgttatttgaaaatgagagtcaggacagataaaatgatacatattcaagcttacatagtaagaggcagttgacttaaagtataataaaaaaaaaaaaatatatatatatatatatatataaaaagattccgggtttcctgacacccaggttgtaactcttttcacctctatgaaattatttgtctttttaaagcaatagaagttattcaaccctacagccacaatataactataacacaaacatggattacgtagttttgagtggaataatatgagtaccaggacatgtgtagacacccagtacttgattcatttttttatcgttgtagcagaattccttgcatatttactgaatggattccaaagatcactttggggtaaacctgcaggataaatgcctcagatagcaaatgttgttggctattacctttcctctataggttgatacttttctttatcataaagaaattgtaccatacttcttccctagaactcaaagtatgcctacaaaagcgcttaaaagggttatgcaaaatgaaggtacaaacctgcaagtaacccatctctatcaaatgtcttttagcaaaataaaatgagccattttcatataattctccatcccagtcttgtcgacgaggccgtttagctggatttaaattcagaggttcggtcacttcacgaactaaaagcaaaaagttagagtaagtccacgttgccctgaatatagaaagtgttaatttagtaactaaaaaagttaataaaaatgaactcagaatgcagagcatttctttatctagataaagaacttttctttttttttttttgagacagagtctcgctctgtcacccaggctggagtgcaatggtgcgatcttggctcactgcaacctccgcctcctgggttcaagcgattctcctgcctcagcctcccaagtagctgggactacaggcatgcaccaccacacctggctaatttttgtatttttagtggagatggggtttcaccatgttgtccgggctggtctcgaactcctgacctcgtgatccgcccacctcggcctcccaaagtgctggaattacaggcatgaggcactgcacccggcctgataaagaactttttttaggctgaatgtggtgattcacgcctgtaatcccagcactgtggaggccaaggcgggcggatcacttgaggtcaggagttcgagagcagcccagccaacatagtgaaacgccatctccactaaaaacacaaatttagccgggcatggtggtgggtacctgtaatcccagctacttgggaggctgaggcaggagaatcgcttgaacccgggggggggagattgcagtgagccgagattgcgccactgtactccatccagcctgggcaacagagtgagactctgtctcaaaaaaaaaaaaaagaacttttttaaaggaataaaatctgtaataattctgatgatttatctttgcttt

SEQ ID NO: 97454 - DNA, 51353 bp, Homo sapiens
tttattgaagtactgaaagaaaatatacaaaaatgtattaattttagatcaataggatgatatggaaggtatgctatttcgtctactttacactttaaaaaattttttttacagtaggaatatattactttgataatcaggggaaaaatcataccaaattgaagtttctcataactatgaaaccaggttcattatgttccttatatatgtatgactacgatttcttagctacccttctgaacactgttctctccatttttgaaatcatcttgcatctaaatagcaaatgaatctttcttaaatacccactcatttatttcttatataagtctatattttccttttgcttagtcattttcagtactgaattatgtctatatatcaagtctcaacttctttggtcccataacacatatccaaccttgtttcctgtgaatttctaagctagttagtcacgctcccaggatcattaacaaggtcagtcttctggtcttggctcttttgtaagaatccaacagtatgccttgccttctgcctattgaaacacaggctaggcttagcttcttctctgagaccttttggaatattctagctctcaaagatgttttaactcttatttctgtagtcctgactccattccatgtaatttaatgtttgatcacacaaagtttctgggttcttgatatcaagagctctgatttatacttattttgttgtccctactttctgcccagaactagctcaatagtaaggaccctctaagcattcatcaaatacttgctcattaaaaggaaaatgcttgaaaaccaaatatcatatcacgtgctgcaggtaggtagcaattaagccttctaatttagtttttctaacttttcagagcaaattccagattatcctatatatttccatttaaaaataaatattgctaacaccattgggcaagtaagacatatggcaatatagaatgctttggtagcactatggctgtgacttaaattactgtggatcaaactgccagaagctgagaagataactgaattttcctcttcctttatcctctagtgaggacagaagataactatatcatgcctatcgatgaaaatatttaacaataaaaaactgaaaacactgctttataacttaaataatatagtcttactaccaaatgttttagtcataggatctcttggaagcttgaatggaagcaaactttagggttttaattatggatgaagccatacaattctggaagcaaagtataacaagcagccaaaaatgttacacatatgattctactccaaatgggcacattggccaaatggtgaggccccgcacaatcatacactttgaccactcctccatatccatcaagagggagctgggaaatctgttatcatagatatgaattctgtgtgtttacctagtcagacaaaatcaaattgttcttgtttttatgatgtttgatagttgtgagttggctctcaatatcttataggtactttatggcctttcaggatttcctttcaaataaaagaagatgaaagatggaaaggtacatcttctgtttcttacttcttgcaaaagggtgaccttacaattccttctgtagtcattgattttctagttgattgcaaacatttagcttaagcaaagttcaatttttttaatttaaaaaaatgaggatacatatgctacttatctaactgacatgggcttttaaaaaagatgctgctttagtaattctacttattactgagaaccaataagttatataaatcaattttatgaaacttacctaaaagatttttgagaaggtgggataaatctctatattcaagtcatggaaacttacctttaaaagactaaggttccttttaaaagcagtctcaacagtttggagttgagatgccttttctgtgtgttgatcacccaatttattctccatttgttgaagtaacattaatctttgtgatactctagaaaaaaaacgaagattatatagagttaaaaaagtaaaagcaaacattttactgcttgaccaatataaaaaattcatttcttaattgcacctcacttcaactctaacctattctgaaagtcaattactatgtcgactaataagacagtgaaaaatctgaggtagttcaataagtcttaagtcaatctggttaaaattatttttattttcattaacatattctttatatatgccataagtacatgcttctgtttttttagcctctctggtcttttgaaattattttagaatgttgaagatatgttttaatttttggtgaaaatgcaaactgtaatacatatccctttgtacacatagttatatatacctcccgacacacatacattgatataacttgctatatgaaaccttctgcttaacacttcagtacccctgaatctcatgttacacatttagaattgtgctaaacttccatatgtttgaagaagcaataaaaatattttttccctctttttccaagagaaagatgatggtttgatatatgagtgagaggctgtgtgtatgtatgcatactcacaacaaggtaaaacagtaattgaagaaagatgtaaaaaattacaagtaaacatcttcaaactacttcgttacatataatatactttaaaagtttcttgctggtcaaatgcttattttatatgtttttgttctttttaggacaatatgtaagatgattaaaagatacatacgttggtatacataacagtcaaactgtttcccaaatagttgtggaggttctcaagaaacactgtgtttcatcaggctgtcttaaaggtggaattaaaatctcaggtctatgaacagtcaattttttggtaaggaaagtatcttaggagccaaggaaagaacgtctggtaattaattaaagaaaaggaaaacctgaaagcccacaaacagaggaggaaaagagtgaataatacaaagcaaagagcaggactggctacacaatttgcagggtccagtccaaaatgatgcaagacaatggcatgagagcattaaaccaaatgcaggacctgtgactgtatataagtcacatacccaagaagccagccctgtgtaagaggtttagagaagcccattaaatgccaatgtggagcctagaaagggtgggaggaggggcaaatttatctatatattacttacaaagagtaaaaatacatagaacataccttttaatcttgcttattcataagaaacaatgaaattccctaacactaaaacctcttaagtgtcagaaaattaaaatgacatgcttgcaaatttttaagtcatcctgtgtatacaatatttcactaacaaagccagtccaatttctatatctgaatcatccctttaaaaaaacttacatttcttcatgtcttttagaaaggcgaatttcttgagcaaacaaggaagtcatctttaatcaaagctgtcataaagaataaaaacatttaaagttacttctaccacatgtcctcagctttgcaacatttgattattttagtaccttaatccattggttctctcagaagagaaaagaaaacttaagatgtaataatgtataaaatgaaaggatgcaattaaacacatttttattcagcatgccagatacatctaagaatactatgaattaggtaaacccaacatatttcatattgtcttctctttctagactctaaccttaatcagaattaaaaacaaacaagcagctggtactaagactactaaacgttttattgaatcaacagaaaaaaaatctgctctgtaaaattcaacacaggaacaccatcccttatgcatgtgcaaacacacatagacagaaaggcaggcaaacaagtatgagaaccaactggaaattcaaggtctttcctttattggaagagtgcccagttctaccatctctcttctaaataggaaagtacttttcatgtgtaactgcgaggaaaagcacaattagatagataccttccccttcccctggctgctaagcactctcatttgtggagtgcaggaaagcccattttcgtggcacacttcacaccacgagcaagctcaccttggctaaagacactggaccgacacagacagaggtctagtgaaatgctctgaaggcctccaaaactgcaggcaactcatctggttgggcttaaaaggttaaagtgcttgccctaagggagaaaaagaggaataaaattccttcctgaaatgaagctttcctaaattttatgaaattaaacatctatgcactctataaagattgtctaaagattgacacaccgcctgagtgtccagtcctgctagaaagcccacgcttattgagtgtagggtgctgaacccggccaaggaaaacggaaacaccgccctgccctcattaggtttcctcctctgggcgtggctgcctttccttcagcaccgcggacagcaatcgctcacaggcccgccctccggggtctaaattacagatattttccgctaacatcacccgcaggccaagtcttgccgccttcctctcggtttccttttgcaacgaggccaattaatgcagcgccaagggaatcccggaaagtcggttcatggtaacttttctgtgaggcccactatcagcactttagacaaaaccaaatcacattctccccttagaatcgaagatccgcaccttctcagagtcatctgccctccggccgccccaactcccgcttatacccaaaggactcatgaaccttcctcatcagcctggctctttacgttaacaacatcctccccagcggtcctgcaaggccctgcgcggccgtcaggcagtcagggcacccacccactgtccgactccactcaccgagcccgcctctgagcccttccgggaaggcaccagctactgcgccgacgccggggccttagcgcaggccagggcgtggtcacgttaccatatttgcgcacgcgcggcgcgcggtgacgtcaccgcatctttataaagggccgccttggggcgcgaaaagttcgtgaggtgtagtcgcggcaaccaggaggtgggcgtgtggtaacgcggcgcgcgggagggtggcttgaaagggtctttatgaaccctagggaaaggccgtctggtaggaactccatttcaagaccttttaaagtgagacctgcatatgttgaaagagtttcagagagtgaagctgggttcttagaagctggaatgtcccagcagaatgtagaaatgcgaaaaattcggcacagtagtctaaagtgagtcgagtttacagtcggtttattcaacgaatgcctgtggagcagtttcgaggtgcttcgtcctgggcgtcttatactgagcagagcagcaagagcccctgcctgctcatagttggtagaccctgtgttgacagtagtattgcttgatcatgccttgcggggtttctgagtgtcagtcgacatatttacgttggttatctcattgagtccccgcaaagccctgtgaaatgggcacattagcttcatttgacagccaaggagacaagcttggttgttaatttagcactttgtaatatctcgtttctgtaaagtgcgtttcttaattttcgttccttgaaataagtatatggtagtgtcagtcctctaatatacagaggaagaaacaggttcaagagaggtaaagttgttttctttataaattatactctgctggtaaaagacaaagagctaggactccaaaatccaaggtgttttttaaattttctcctcgtagaatatttacataaaacgtagctcttgcgtcaggacttctgcacttaatgtttcctttgcttggaaagccccttctgacatttatagatttgattccttgtatctttcgatctgtcacctcacaggaccattccttcaatctccaatataagaatatctccacctcctggctccctatcctccacctgctttatttttttccgtaacacagtaacattgcatatattgtgtaatcactcatttatttgtttagcaggtgcacccaccactagaatttgaacatcctaagaacaggtatttttgtctctgctttgctgatgtatcctcagcaaccggaactgcctgacatgtaagtgctcagtaaatatatttgaatgaacgaatgaaataattcctcccgttaacattcatcataatttcagagtactctaacttcacttgataggaactttgattttgctgttccttacccttaccacttaggaaagatgaaaagtagacccttgagtggtcctctgttctaggaatgaaatagagcttttgcatggttataaggaattcttgtttattttttatgtacatttacaaataaggatttttcttaagttggtaatgggttgcatgaaaataataactgtaggctcattacagcatttgtatgttgcttgacaaactgcttacctccctgctttgtgtaagtttgcatagtaacacagttgggacaaatccggctctttcaactttgagcccaacttttgtaggtcaccatccgccttagctgtgaactaaggaataccttgggagttttcttgcagtttttaagaacagcaatcaggaatatatcacagacacttgggggttatctagatagactttgataatttattttatagcatccaataaaggtggttactttctacttaaaggtctgtgatagctgcccttctcattatattgcccacagctgatcctttctgtgagacaccaggctgttgaggaagaatctatggcaacattgtatctattaatatacagcttctgtatttatcaggtaagtttggatactttctggagtgaggcattcacagccatgaaaattattgcaacctactaagtaacaactgacccataatgagataatctgcaaaggtggtgtgaaattaatgtttcctaacmcctggactagttctatgcaccagcatgcgataattatctcctcagcctcatataatgttctataattgcccccagcttcattatttagaaaacattgtatcatttagtcatacattctataaacatgtatgtattaaacatctgtaagatgtaatctgcccttaagagcctagaatctggctgggcttttaaagtatacacaaaaagctggaggatgatggctgacaacataaaaaatggtttttattgaatgtttattctgtaccagacactttccatgaatcaccttatcctcataaaaaccctatgagcaagtgtgccgaagtcttagtatcctcatttttatagctgagaaaattgagacttagagaaattatttacttaagatcacactgctagtaaatgaacttcaaagtgtttgatgttagtattctaaataattctgtatgttatcttgaggttatagaattaaaaagtatgccgattatgaggatgatagggaagacaggagagagcactatgagctggaatagtatagacagcattttgaaagactcaggtggaccttgaaaaatgggctgatttggaagtcattttgtgattgggtgtatcaggtggcaggagagtgtggtgtggagtgttctaaatgagggaagcagcttgcatagaaatgtgtgcatgtgagtacatctggtgtgaggcctaatggaaaggaagcattgggaagaatgttttctcctcattttccttaattttgaagatttcatttctgatgccatataatttgaaaatggaggtttgatagtaataaagagatgaaattattggaggaggtaagactggtgagtagaaaatagaaatgaagacagaaaaggaaggcttgaggatggaaaagaaaggacaagcgttaaagagtaagaaataaaaaaattgcagaatccttgactatttcaaatactccaagttattaacagtaaattctgttatagtttatataaaggccatctttttagacccactttgagttttctctggatagacaagtactaaaaaaataaagagctcatgactgacatagtttttcttcctatttcaggaratcctgggtgaaatttggtagtgggtccaattgcctgcgtactttactttgaaataaaataatcagaaatttaccttgttccataattatagtctgttcrttttattatggtaaaatattctatactcaaaatatatctgaaatgctttaaattggccctgatggatattgagtagagagaatttataagcagatacttctttagagcttttgttagtgaaccaggtatcaatttaggttcaatcagataaaatgctgcaatagagaaatcattctgacrgttgatgtttatgttctagacattctcagcggagatcttgctgataaaactatgctcaatcctagagattgccagtgagaatttgcatatgcctcttccttccttggaaaaacaaaaaccgcagtagttgtaaaatgcacttgagaaaacattagaaattttaaattgaaagcacgcatgttgattcttaggaagtcatttgtttgttgtattatagcaggagagggaaagtgtcccttctactctctttgaacctttgtggaaatgactgacaataaacaaattaataagagaaaaaggaatatgatatggtttggcttggtgtccccacccacatctcaccttgcattgtaataatccccctgtgtcaagggtgggaccaagtagagagaattgaatcatggtggtggtttcccacatactgtcctcgtatagtgagttctcaagagatctgatggttttataaggggtttcccccttggcttgtgcactcattcgcttttctgctgccccgtgaagaggtaccttctgccacgattgtaagtttcctgaggcctccccagccatgcagaactgtgagtcaattaaacctcttatctttataaattacccagtcttgggtatgtcttcattagcagtgtgagaatggactaatacagcatacaaatatacttaatgtgcataaacacaggagccatataaaatatgaggctcaaagaggggccggatggttgaggcttaaatactccagcggggagagggaaatggtgaagggggtgctgtagacaatttttagagaggtaatacatgactttagggaagatgaatggacctgggaggtagaaatactagcttgtaaatgtttttctttgtaatttgagcctaacaggcagaacaaaatcccttcaggtgtggttacatgcctcagtcttctttcctggtaataaaatttcaaggaggggatggaaggcagttgtgttctctttggtgggccaggtcttaaggcggataaaggaatattaagagttaaatttcaccctgttctgggggtggggagaagggaggacaggagagattagaaagtccttgattctgggattataggtgtgctgtggctcacggctataatcccagcactttgggaggctgaggtgggaggatcgcttgaagcctggagttcgagaccagcctgggtgacaaagcaagctcctgtctcaaaagaaaaaaaaaataaagaagaaagtccttgattctgaggtaatttctaaggccttcctattatggttcaaagtgttcagcatgccaaaacgccattcattttgcagtgttgttttctaagccccaacagtatacatagtaaatgtgtatgcacatgctccttaatgtgtgatgaggttacatcctgataaacttactgtaagtcaaaaatattgtaagtcaaaaatgcatttaataccctataagcccattgtaaagtcaagaaattataactcgaactgttgtaagtcagggaccatctgtactttttacttcacaaatttcagtaatttagagctcagacaaacccattgtcttaaatggacacttttccagacgtataaaatttatagaaggttttattttttttttcagtcctgtttccatgattttccagtggctctcagtacattcactagtctctatgactgttaatccaggcttttcttgaggtaggcgttttctcgttcacggccttcaggcttgcttatttttttttctctctgtttgttcctctttgattcttataatcctgtaataactttattagtccacaattgagcaagcaattaagaaccttcttaaatgcgtacttgagtactgtacttgataagtattctgctattgccatcttcttgtaatgctacagttgtgtttattgaaaacattcaaggctctttgcactagcctgtttttcatcatcattgtttgctgtgtgcatccacttgaaaacttgcatataatttcctttgaacaagagttgcagttttactggattgcaacttctttgtttcagaatctaatgatgtataaaaatattgttagaaaaagctgttgtggtttaatgcatttgggaaagttaatttaaaaaaacctatactctatttatatgagaacagtaatattttacctaatttttggaacacttcatgtgaatacatttcttctgtgctagggcatcaagtcttattttgaaatctaatttcatttttctcttcagtatccctttttaaaatagatttttaataatgcctttcttaaattgaaagctgagtaattgtactgatggcttattcttacaaactccctgctgaaattgggatttgaatgccacttttaacataagaatagtaaaaagtttagttagttgaatatgcagttgggatttagttaatttttctttttttttttaattttttttttgtttgtttgtttgagacaaaagttttgctcttgttgcccaggctggagtgcaatggtgcgatcttagctcacctcagcctctgcctcccaggttcaagcgattgtcctgcctcagcctctggagtagctgggattacaggcatgtgccaccatacctggctaattttgtatttttaatagagacggggtttctccatgttggtcaggctggtcttgaactcccaacctcaggtgatctgcccgcctcagcctcccaaagtgctgggatttcaggcgtgagccacygcacccggcctgggatttagctaatttttcataatcatatttttcatatgtgaaaaaaatgaagtaactactgaatatctttttatttgggtctgcttttcttggactcaaaaaaaaaaaaaaacaaattgtaggtcatgaaatagactataacctgaagtttttaatgtatttcccaaagtccagatgtgtattaggttgttcattggcttgtttatatcgtcaaaaatagcgttttaactagtgtaaatgtaagtcttaatttttagtcaacttaaagtatttgcagtaggtgtaattgctaacagtaatttgaaaaattgcatgaagttatccttttacagtttttttgtctgatgaatatttgtttgatgtgaagaagtgaaacatgtttgcctgtatgccaaaaattttgaaaagaagtagaggggaaaagaaatggattcattttaactctagatggcagttaaacacaactaacaaagaccaacttttttgaaataaagagaaaaatagtaaaacacacacacgttctgttttactatccagttaattatattctcaaaatgatgtctcagattgatattactaaataaacatttataagatgtaattacataaaggtgaaataaataatgaaagcctgtaattgcaataatttttttttcacctggtaatatggcatacacccatgcaacggtttatattgctagtattttattttgtcacttttactaacatttaggtcagtgtagtttcattttatgtacaattatttaccactatcaattcaaaccatatgccattgggaaaactattacacatttaatgttttgaaatgtttaagtagaagcaaagcttattttcatgaagtgtgttccataaaagtagacttcaaaatctgccatagatatccatgcatgtacatttgagatcgcatttttctttcctttgctttgcattaaaaatatatttttacatctgtttaattcacaattttagcttgttgctttctggggtgctaaaattatgtttctgatggtatttatgagggaaaagaaaagcttgtttgattatactttgttctcatctcgtggtctcagctcgttgtgtactgtcatttctatagacttgtagagtgcaactgtttcttgtttatgaacaccatacatttatgtggtatctagcaaatagtacaaaaataacttaaagtagacctaaggagtctcatctgacttgtcagatagcttaaaaaaggaaaggatgtgatatgttttaaaaatgctttattgtagattttatatgaaataacttaatccttttgagaggactagttgatttgattctcatttcctatatatagcaatttatgctctgagtatctgtctgaatagtggattagctcatacatggcagctgatgccctgggtgaagggacttgctctccacttttgtaagccctgtgaagttgtaagaaatgttactgtcatgcataaaggtgtggaggtgcaggtcaccctactggaaactaggaccttattggacacctcagatcttggagtcagcatttgcctaaatgttcagtagaatctccaagagttcctgtgcctttagaattatttacctggactccaaactcttcatagcagttattgtttcatamtgggttcttcatggatgctagtggaatatatttaagttggcaaaaggataaacactttcttttctttttaaagcaacataaaaagtcccatgttactcaaaaagtaacgtaaaagaatttatccatttatttttagagaagcttctagtagaattctataagaataaatagagttgctcacttccaagattgttgccttgcaagaataaaaggtgctggagawgctgattttttttttttttttttttttgagacagtcttgcactgtcacccaggctggggtgtagtggcacgatctcggcccactgcaagccccgcctcctgggttcacgcccttctcctgtctcagtctcccgagtagctgggactacaggcgcccgccaccacgccaggctaattttttgtatttttagtagagacggggttttaccgtgttagccaggatggtctcgatctcctaaccttgtgatcctcccgcctcggcctcccaaagtgcgggggattccaggcgtgagccaccgcgcccagcctggagctgctgatttttgaggtaaagacagaaacctggattttcatatgaagtcatcttacttctcagtgttagcaagtcattcaagtaaaaaactacaaagcaaataacttaaaacataccagcagactgagagtttgtaatctttaatgtatagcactctcattttttagctcatttaaaaataacatatattgtaaaattgattgcttaaaatcttttagttattggatacaatctggtgatatgtgaggttatactttagttattttaaaatcagattttggggtttttctaaaagacttctatttcgtatccaccatgagtgtcttgagtaatatctttggatatctgatcctatcctttacatttttcttcctaatttcatgatcaaagaataaccttaaattaagttatgggagtgtgttgttataggtacagtgtgctacctaccttgtgtccaaacatgcaagtactaaagaaatgtgacaccttcatcattagttttctttatcttacatttttccttctacagtcttctctatggtcttagtgattttttaaaaacataaatcagaatttgtaactcccctccttaaaccctatagtggctttccattgcccttataaaatacacactccttggcatggcctctaaggccctgcttgatcagatccctgcttacttctctaaactcatttcttaccaggttcccctttcttcactcttatcttgctgatgtacaccaagcttagtcccatttcaaggactttttcacctgatgttccctttgcctggaatatcttccacagagctttatgtgttctttgctagtcacttcccgagtgaggctttcctgtccaccctgccaaaaacaattcctttcaccatcattttctgtcttcttaccttgctttctttatttatttaaagtaatacttaacctctgtctgatatatatttgcctacttgtttgtctttcctctcactggcatatacatacatttcatgaagacaggaactttgtctatcttgctaattgctatatcctcaatacctagaagagagcctagccctattcagctgaagagaagtgtaaaataaatgaataaataaagtctaggtaaccatggtgacactgaatggtagaagacagacctcaaattggaaagggctgcagaagcaaaactatgaagatactgtaagtatgatgctggtacctcaatgctgtacatttgacatatttacccatcatgtaacccatctcacaatggctttttttcagtttttgttttagaaatttgactttctatatgatagaattaaaaactggtattttaaacatgctttctagaactacattcacataaatgatttactaaattcataaagtgtggtttttacatgtggactactataataatatgaaatgtattagaaagttatcctttctgaatcaacgtagtgttgacatttgaaggtcacagtaaatcctagggatgtgttttaaatgatacagtcatgcactgcaaaacaaagtttctgtcagtgagattacttgtaagaaggtggtcccataagattataatgccatatttttacggtacctttttaatgtttagatatgtttagatacacaaacacttactattgtgctacagttgtctacagtattcagtatggtaacattttgtacaggttcatagcctagaggcaataggctgtaccatattgcctaggtatatagtaggctatgccctctaggtttgtgtaagtaactctgtgatgttcaaataacagtgaaattgcctaacaatgaatttctcagaacatatgcccatcattaatgtaagacatgactgtactttgaattgctatcagataactaaggattctgagaaataagattaaataattatttgtatggtatttgctttgctttaaatatccttagtatgagtaagttcttggtagagaagtaattcacagtagacacagcacagaaaatatgttatatagttaaagtattttagcattgctgaaagatttttttgaatagtttttgttacagtttgttttgcatgtgaactctttatgtgtgtgagaaaattctctacaaaagatgttttaggggtataatgatggaacattcacttatttcatgtgcccaaaatattatttctctctcaaaaatatataattttatggttcagatgaatttctgacagctgtgaatgctttgtaattcattttaagatcaccagttcttattgatattttaaaatatagtctgttgagagtacttatgtgactttatgggaaggtttgtgaaaaaaattggtttatataaatttacktctctgccaactttgctgcatgtaaatatatccctatcaaatttctaccttcatcgggtaagggtagcacacccttaaacaaagtatgtacaggaaaagaaataaaaaaaatcagtaaacttcatatcccaggcatattccagtttatgctgtgaatagaactagggagtttgacctttacaattgaaatgtgctgagcccttagacttacatttgctagagaggcagtgtgttgaatagccatcttattgaatgagaacatgtagattccagctctagatttgctactgatgaactgtttcatcattggtaagaaaggcaaaaattaccttctttctctacgttacaggatacttgtgagggccaagtgagataatggatatgaaagtgcttttggaattggaagacactatgaagtgtaaggttttcattttagagtggctttaacagtaaactagatctattttcttagactgtatcacacatagtcttcttactaaggtggtgtaaaaaccttataaattgtttaacttagtatatgtgcctatcttatggactgagttttccttgatagcaagactgtggtgtattttagtcctgatttattctatgaatttccagcccttatcttttcaaagataatattttctctcatctttgtaataatatgagctgaaaagactgataagctctaaagtwtacttagcaggtgaataaaggtatttatacattgatttgacatgcaaataaagggttgttttttttttttacagtaaatcttgcaatagtgttcttagctttatttatatttttcattcagcgttgttaactaattttcccatgtcttttagactcagaattactgggtattcgtttttcatcctgraacttacacaaatgaattctcaaaagtcattgacaagtaaataatttaaacttaattttaaaacgttttaaactcacagagcaaagtttctcagaagagtagaattaacaaatcttggattttgaggtatattttgaaagcacaaaattataatactattttatctccacatgcgtggaatagatttcattatttttgacctattgcttaaaagagagctgtactatttgtattaaaatttcatgttcttgggatacttttaagtagagtgagctgtacaagaaaattctgatctttgagaagcagtgttttcaaggaaaatgtaaaaaaactgtactgactcaaatggtctgttttatagtctttattttttttttttttttaattttactttaggttctgggatacatgtcctgaacgtgcaggtttgttacataggtatacatgtgccatggttgtttgctgcacctatcaacacatcatgtaggttttaagccccacatgcattaggtatttgtcctaatgctctccctcccttttcctcccacccctcgacaggccctggtgtgtgatgttcccctctgtgtgtccatgtgttctcattgttcaccttcaacttatgagtgagaacatgtggtgtttggttttctgctcctgtgttagtttgctgaggatgatggtttccagtttcatccatgtccctgcaaaggacattaactcattattttttatggctgcatagtattccatggcatatatgtgccacattttctttattcagtctatcattgatgggcatttgggttggttccaagtctttgctattgtaaatagtgctgcaagaagcatacgtgtgcatgcctttatagtagaatgatttataatcctttgggcatatacccagtaatgggattgttggttcaaatggtatttctggttctagattcttgaggaattgccacactgtcttccacaatggttgaattaatttacactcccaccaacagtgtaaaagcattcctatttctccgcatcctccagcatccgttgtttccagacttcttagtgatcgccattctaactgacatgagatggtatcttattgtggttttgatttgcatttctctaatgaccagtgatgatgaggtttgttggctgcataaatgccttcttttgagaagtgtctgttcatatcctttacccagtttttgatgggttttttttttcttgtaaatttgttttaagttcattgtagattctggatagtaaacctttgtcaggtggatagactgcaaaaattttcttccattctgtaggttgcctgttcactctgatgatagtttcttttgctgttaagaagctctttagtttaattagatcccatttgtcaattctggcttttgttgccattgcttttggtgttttagtcatgaagtctttgcccatgcctatgtcctgaatggtgttgcctaggttttcttctagggtttttatggttttaggttttaagtcttaaatccatcttgagttattttttgtataaggtgtaaggaagggatccagtttctgttttctgcatatggctagccagtttcccagcaccatttattaaatagggaatcctttccccattgcttgtttttgtcaggtttgtcaaagatcaaatggttgtagatgtgtggtgctatttctgaggcctctgttctgttccatttgtctatatatctgttttggtaccagtaccatgctgtttccgttactgtagccttgtagtatagtttgaagtcaggtagtgcaatgcctccagctttgttcttctttcttaggattgtcttggctatactggcccttttttggttccatatgaaatttaaagtagtttcttctagttctgtgaagaaagtcagtgttagcttgatgggaataacattgaatctataaattactttgggtggtatggccattttcatgatattgattcttcctatccatgagcatcaaatttttttttccatttgtttgtgtcctctcttatttccttgagcagtggtttgtagttctccttgaagaggtccttcacatcccttgtaagttttattcctaggtattttattttctttgtaacaactgtgaaagggaattcactcatgatttagctctctgcttgtctattattggtgtataggaatgcttgtgatttttgcacattgtgagactttgctgaagttgtttatagtctttctttgacagtaacattattgatatatcttccttggttgtcaccttcaggcaaagtcaagtcccaactctttaggttgatatttaaggtattccatggtgtaaaccttatcttacttttccaagttcatcttatttattaagacaaaaagttttgtttatgcaagtctgtttccaacattcacatgaaccgaatgtccttcattacctgttttttttcactcaagatttatctgttttttaaggtccagctgaagtatcacatccttcttgaagcttttcctctgaactcttgtggcacttatttatgttaataataccagtccatttgtaatttatgtaatactaatctatttggaacctaatgataaattgtcatgtagtgttatttaacttttcaggtctgtatatattttattttatttatttgtgagacagagtctcgatctgtcacccaggctggagtgcagtggtgtcatctctgctcattgcaacctccacctcctgggttcaagcaattcttatgcctcagcctcccaagtagctgggactacaggtgtgtgccaccacacccagctaatttttgtatttttagtagagatggcattttgccatgttggccggggtggtttcgaattcctggcctcaagtgatccactcacctcagcctcccaaactgctgggattgtaggcatgagccaccatgcccagtccaggtctgtatacacttcgtgtgtgtgtgtgtgtgtgtgtatgtgtgtatctttgtatagaaactgcatattattttacattgttcctatcttctacagggcttggaatatgtagagataggtatataaaatatgttcaataaatgttaacatggttgtgatagttaccttaccaactattgtagttcttggttggaagactggtttaacatttaagatggggtgaccccaatccattcctagaaactaaggcatagactcttagcataagatttctatctctgaagaacagtactcttagaaaaactttcataaaagtgtttaaaagattatttaggaaagtgaacaatatttactcattatgcattctctttttatagctctcagttattgaaggccctcacctcacatagtcataattgggaggtcaccttccatgtcaacttataatgttaaaagaataccaccccatcccaaggctctttgggagtgttgagcattttgtctttagtagtggtttcatatctcatgtcctcattcacccatcaccttttgtttctcagagacaactcctgcataacaagatgaagaatagacttgggataatttgtcatagcaggagtataaaaccaagtggctcatcttactaaaaatagttacaggttatcaagtcagaaatagtttcaaagagaaggtcatcatctgagcattggagtgaaggggatagcatttcaagtgaggggtgtgacaggtaaacacctcagtgtagggatgaaacagtatgtgaatgaatagattggacttggctagaaaatgagtgtgagttgaagaaaggaggaaatgcaaagttggataaatggtagtagtaaagtgaggaatgatgatatcattaaagaactattgaatgctctaagcaggattgacaagattaaattagttggtttttaagggagattaattaacagaactttatatttgcatttaaaaaatgtttttccaatacatccgttaaacatattggctttttttgggaggccraggcgggtggatcacgaggtcaggagatcgagaccatcctggctaacaaggtgaaaccctgtctctactaaaaatacaaaaaattagccgggcgcggtggcaggcgcctgtagtcccagctactcgggaggctgaggcaggagaatggcgtgaacccgggaagcagagcttgcagtgagccgagattgcgccactgcagtcggcagtccggcctgagcgacagagcgagactccgtctcaaaaaaaaaaaaaaaaaaaaaaaaaaaaaaaaaaaaaccatattggcttttatccgttttgctctgtatctcatgtggcttacacatagcctgcatgatgcaaactcaacaatgtacttggatttctttgctgtctgccaaagtgttttttgaagcacactggttattccctaaagtggctttagtcttgtctttttgatttgttttcctgcttgcataatgtggatgtgaatctgaatgtatgtttctgtcttcatttgagctttattaacaaagcaacataagcattctttctgctaattctagcttagtacatagggattgtgctgactgcctaagcttttccctaaataaataccttaatgacaactaattaggctttcattaaaccatatttgtggaacatcaccttgagtacaaaacatatctattcaagtattgactttcatttggaaaacaaaaacagtctgtaagaatatggctctaaatagaaaatatttttacctgttcacataaatcatttagaagaataacctcctattcaccrggtatagtattctgagttgacagaagtgaacacaaatatgtcgctctgttgtcttctggcttgcatggtttatgacaagaagataagttctkatttacttttagataaagtgttttttaaactctctctggctgccttcaggattttttttttgtttggtttttactatttgaatatgatatgcctaagtgtgatttttttggggggggtgggaggggtagtcatcctgctwggtgttctctaatctccttggatctgtggcttgatgtcatgaatacaggaaaacctaagtcatyatttcctcaagtatttcttctgcctctttatctctttcttctccagttatacagtatgtacatcgtttgatattattccacagtgtttggattctttatgctgttttcattcttttcctctctgtattttattttgggttatacatattgacctgtcttcaagttcactgattctaatatgtgtattacattgtggtttcattttgcatttacttaatgactaaatatattgagtatatttttatgtgttacttgccagctgtgtatctttgatgaagtatctgttcagctattttgcctgtgttaaaaaattggattgtttcttctttttaaatggcaggaaataaggagaagtcaaggaagacagctagatttttagtttgattacctgagtagatgttactactattagaagactaggggaagaacaggttgggggaaaattccagttgtgcttttgtcatgttaagtttgggatgctgattagatatacaaatggagatgataaatgttcagctggatataaatctggagttcagggcataggtttggacaacatatgtactttgggagtcattggcatatagaaagtacataattccatggatttggatggaattacctgaggacagaggctatacatagaagaaaaaagggctactttaacagaagcttggggcatgccagcatttagatgtaaatccaataatgagatttgaaaagtagcaaatattgaggtagtgaaaaatcccatcaaactttttgagtaattttcactctgcaaaagcacctaagggagttgcattttttggaccccaggttgttcttagcatgttcctaaccagtgagataagagaaacattacatgaaaatctcagaaaagaactgctaaccatgttggaatgttctgacacaaaatccagttcacatattcttaagcaatgtgtcttaagcaaaaggtatcttaataacaaatattaatgataaattataagttctcatgattattgcccatctttctatggaaaatgttgcatttctaataatctattgtaagagcccatcccatatagctatttttaaatggtcaattttgaaacattgtcaggattcctgagtcatgaaaatgttaaatattggcatatatttttaaatttactgtttaaacaccaagtgttataagaaaaataatcataacttacttagtaagtcaatagtgttgacacagggaacagataatattatttatatagtgagatactttcaccatataaataccaaaacatgaagtgcctctaatttatggccacttcttcataatacaataatgaatcgctaatgaggccaagtaagcctaggttaagggatgatgatggttatgataatgacagtgatctactgaaagtagcgagagatagaggagataaaaattggctgaggagaaaggaattatcattgtttgtactggcttatagagttttggggcagagatagagcgctgctgctagtgaaggaaataacattcaccattttcgtagtattgtgcaatattctgtgcttggtccttgacattaacaaatattattaagccttctgttccacttttctgaaattatggagcttttttcttttttgaaaaaaaaaaaaactttcttagaaggcacagagtgacttaaatggttagaagagaaatattcaagctttggggcatcatgtgtatttatccattccctgcttctgccactcttgtttctggacagtagggtatatgtgttgctttcactacctaccttcatccccattcacctctcttggatcttacttgactttgtttttgttttgttttgtttttttgagacggagtctcactctgtcacccaggctggagtgcagtggcatgatcttggctcactgcaaactcctcctcccaggttcaagtgtctcttgcctcagcctcctgagtagctgggattataggtgtgtgccaccacatccagctaatttttgcatttttagtagagacagagtttcaccatgttggccacgctggtctcaaactcctgacctcaagtgatctgcccatctcgtcctcccaaagtgctgagattacaggcatgagtcaccacgcccagcctttatttgactttgtgagctccctcattagtgacagaaatttctcagtatttctatttaattgggcaagcttaggtaggttgactcgttattgacaaaaggtctgtcaagcaattaaataaagcagggttatatgatacttaaaatggctagtattaattgagtacttactgtctactatcccaagatctttgcatgcatcatctcatttactcctcagagcagtctatgaggtaaacattagtttctgtattttacagatgaagaaaatggcacttaggaagctgaagtaacttgcctcataacactgtaagtggcagaattgactggcacccttggctttttgaccctgttgtagtccttatctttgaacattttttactgtatggaaaaatgttttctgagttctagtaactaatatagaataaacagaattttgtcagcatactatgtaatacagagtgtctgtgattacaggttttacttgtttgctcacattgctgcacaatagtcttttttattctttccctaaaaaccatctctactatagtgccaactaaatattttggaataaattgaagacctaatttttttaagactaaattaccatctttgtctcatctgacttgaaatgcctctgccaacaactctacattctatatagagtataactaacatgtggtctgtagtagacatgcaggaaatgcttatggaatggatcctaacatagtgctaaagatgtctctggtttagaatgttctgctaagctytgcaaggcccactggatattgctacaaagcctgcctttataccctgcaagtgtagggtgtgggaaagggaaaatagtttataggccagtaamtacaagtcaaatgatttgaaattaccacaaattagataaagttaatttcttcttttcaacttttgaggaacataattgttatgttcagataaactgctggtgtaattatccttttctgccaaacttaacttcgtaatcacaaaagccaattttaacttgctagtaaccaacttctggttcccatcttctagtgcctttatgcgattttactaacataggcaggaatttaaagccattgtcttcaatcctgtctctgaatccaggcatggtcagtagtgatttgtttctaaatctcaaagttccacaattagctgtttaaaaatagagttttggaccagtagcttttttactctagtttatttctgccacttgtagtagcataaatgaarcttcctcgtctaaggttatgtcctgggcaagtaaaagtcatggagtagaaaattgattttttttaatgattttgaatagtcataactgctgcttaatggaatcatcttgggtggacttagaggtagttagtaatgtgggaacccactgggctgtgtgctggttgtctaggattttcatgatgaaagacttagagatacttctactgccactcttggttgttggtttactagcctgagatggaagatggtgtcagaattcatattggatgtctcagaggcaactgctcacaggatccaggcagrttaattaaatgactgatgatggctagacataatgtgatagggagcaatgtagactttggtgaactggagagcatatgtttcccctaaatgcaaaaactgctgttcatttccatcttgttactgtcatgggagagtgtgagcctgttacaccaacacccaaattttttaaaggagtttgaaacctgaatcttattgcaaaagttttcatgttttaaatattggtaactaatacaaactttaaaattatgagccaaatacaatatatctgtggactgaatgcaatctacgggccatcaattcgtggacctctggtgtatcctatgatatagggcagtagtttccccatggatataatttgaggaagactaggattatatcctaagagatttcattcttttgtgctagagttgttcttccacatactcttcacacattgtttcttaaattcctcatgacagcgagagtgaagtttcagctcttatctatatgggaagaaaaactggggccttgggtaggaagagttgagcacctgatatggagccactaaaagttaagacagaatggtaggccaaagctgccaagtttgggacttgtatacctgtttggaaatgtcaaaagttcttgttaagtagaagcaattgtactgatcttacacatatagattctccagaactcttgccaggatatatccttcatcctacctcgtaaatattaagagagttgttacaaacctagttgatacactagagaaaatagtaattctgttcacaacttagcagcagagtcataaactgaataaagtttgattccttagatgagcaggtaaaactgtcattgtttactctttaaaggagaaagaacgttgataaatcaacccagcaaagaccattctttttggtttgctgcctgtgtaaagacgactaccaatgttcattttactaccatgaaaacttagaccagagggttggtgggtattaatgtgatctgttaagggagactagtaacctattttattggatatagacattttcatagaaatgctcaacactactgaatacatcaaaaaccatactttattttatgtatagcaatacaatttacatattaaataacactataatagaatgatttgatatagtttaaacagaagaaaaagggaaaaatttcaggttacaaaacccctccccctgaacaaatttaaaaaaaaaaaawaagcacactttttccaaatgggtcaatgtgacgaatgttttcagtgactaattatgtctaattcctattgcacaaatggtcaatggaattaaaaagaaaacccaactttcacaatcactgcctcaaagaaataacacatgttggattcttttggaatgtaaagatggtttttgctacttcaatacacagaaagttgaattcacatatccaccacaaaaaggaaaaaaaactatgacggagttgaaactagaaaaaaattagctttatatgaaaatataaaattctatgattatataccatagatacaaagttcccagaagatgcttacccaagcaacaaaatatttacagttttaatgatttttagctatttcaaaatggagtgaaagaaacatgagtcaatgtgaagccagaattctttagaaacaatggctgcttgctagtttcaaatgtcctaacaaaaaaggagtcactaccccaaatgttggagagttgcgacattttataaaatcgactttctccttttctggagatgtttatttcttaaaactcaagatatttttcttgaaattaattatcctctgtagaaaatgcttccctttgcaaatatttaacaaaaatactaaaaacagtttaacagctaagacaaagtagaggccaaatatcattattacaattccttcctatttgtagcatgccttcttctttctagagataagtaaagccagtattgtatgttaaatgacaactaagggaaagcgcaaagggttaagtgaaattacatctgttaaaaaaaaaaaaaaagcaggcattttcccttcatataaaaattcactggcaccatttgaacataaactttagaacataggagttgaaaatgcatttccagtataaccactaaattcttaagacaaactacattttgattcttaaattatgatgagttgggttttttttttagttttgcttaraattagtaatatgtatctttggtaaattggtatctatattttaattttaaatacagtatatatgcatttaagaaaaattcataacaaggcagttgtgctgtgtcattataaaataattatttactgatttcagtatgtcactctgggctaaaaactccaacaaccagaacttgaacaccgtaacccttctttggcctcgctggactcttctacttgaatagactaaaaactctaaaggcataaaaattaggaagaccaattagctaatcttactctttttgaaattcagaaattaacttttttcatattaaagaagatatcttggctatcgcatataagaaagagttctcctgatggcaacagcatgtcttttctttgatgtccagcacagccacttggtctgatcattgcaatttatttttatatgatgtgtgcattttgcttacctagagctaaattcatatacacaaacagcttattttattaagttgcacacattaatttgcaatagctatttcctttcccctgagtgcaagtgttaataaccttgttatgtacttaagcaatgtgcttatgtctcaaagaaaaccctgtctttgaaactctgcctctggaaagatgcaagctatgtttttgccaataacacatgaataataatagtgaggatatgctgtctcttgcaggggtgaggacctgctaaatataactgtcctcattgaagygtgtttggactactttggcaagatgggcaagtagcaattgcttataattcagtgggtcaggatatgaagactttggttcaagctcgctgaagacacacagattgctcacagggaacttctaaactctttcttttattgtttctatcctatttactagctgttttttcgtgattctgaaaccactgtaagggacagccacagaattgcattggagggtatgcctttctacgaattgagccctctataaatagcacaggagggaatacttgctatttgtctttgaaccagtgtttacttttattaaraaaaaattactgagaaagggaccatgaaccctaactcgaacattacttttgaacatcaagcccactttgccatctactaaaaagtgttaactcatatcaatactctatacatctaaaacaacccacttaattgactaaaaaaagagtctagctcattgctttcctgattctcctcagcatctggcagttgtagtgttcctgtgttcaagctttacttgaactttacagagcttcctgtgtcacctctggttggagcggaggggctgtaaaggtgtctctcatctagcacatgcaacttagcatgctctcttgaacatcttatctcaggactagcttacgcagctcttgaaaagcagagtattccatgttgttaaatctatgtattgagaagatgagataaaccctggtaaattatgtagtttatgaaaactccattgacctggcctttgcattcaaattctttaacttggcccatagcttctttctccttagcacttctggtcctccagcaccattctgacaaactttatgaaagccaaatcaagataaatagaacctcagtgctgatcatcattaatgtttaatgcatacccagatggcatgacagcagccagcgtggcctttttgttgaagttaattgacataaaaagtaaataaaaccctattcttcctaacaggcccagttctggtgatgatttcacttttgacagaagctgtccctcaaaagcaaacatgcaatagaagaaacagatctcagtaagtagcttattttccttacaaacactactgaaatttcttattaatgctcctaattttcccattatgcactgcagcgtgagtatggctccagaggctgcacctaataacttccttgagctctaatgattattggtatcttttactaatgtgtatctgttctaaactacacaaaagcatacaaagccatctccctcttttaaaaacttgaaaatgtgggtatcacctttaattaaatattttaaatttctctctccaaatcagatttatctatgtgtgggagtttagatagtcccaagacttttgctaakacagtatttccaatttaatcttaagtagaaaaatgtatgtaattaagagatttattataaaacatttggcaaagaaggaaagaaaacagtaactatgtaggtagtttttattagattgctataggagtaatagggaatttttagaggactagtttcaaaattacacacctgcagaagttttcattcttctacctactgtgaggtatggtattacaaactaagaagcattaatggagaataactaaagggtctcataactgagttgtatataatattgctatcttgctattgttaaagatagccctgattttaggatgtagctattttagagagtcaaaatggaaataacacattgtccacatagctactgtgaaagctgtaatacagagttatcctttattttgacacatttttaaaaaactgtgaatataactttgtaactaataagggatgttcacatgaagcagttcttaagccttctaacttcttaagggatctcttaaccagcataaatggaactgtttcaaggccatgacattaacagacctttttaggtcccagtagcctgctagtctgtaaaagaaaacaatgctatccactccattaaaatacagaaggcatacagtattgaacagtgcctaaaataaaaaggagaggaggactgaagaaaagtacagcattgcctgctagtagaatgcaaccacttcagcaataataataataaaagcaatattcactgtcataacaaagaccttcactgtattgaactaaaaaaaagtagcatgtatgtcgtcatggaatgtcacatcagggtttgctgttgtataagattataggcagtaacactgatcatatagtgcaaactaggtaaaattgcgtttcactgtgtgaaatgaacagaggtgcaaatgctcagtaggataccattaagacataaaatggcaaaaaataaatatcaaaacttttatcagtgtaaaaaagtaactgggttattgtataacctagagtctggcaaaaaaggcctcaaaaaagttctcagtcttcagaagtttacaaattaagtgccctttcaggattccagtcacactagggactccatgctctcagcagggtctgattcatctgcaataagaacagcaccatttttgtctactgtcatgggaccatttccattttctttagtgctgaccaagctaagcattgctttatagatgaactggtattgttcctgaaaaacaagaggaagacagtttgagccaaagaacagtttagtgatttcacataaggtggaaataccaattaaaatggtaattgtgaaaaacacactagagaaacagcaatagcataaatgttatctaaaaaaactaaaaaaaaaatcatttgaatttattatagtcaagacctataccttcttcatgtccttttgatctctgttagcttggaaccaattctcagtgctgattgttaatgaacaatcattattggttaatgaagataaccaatatctggttaatatctggttaatgaagataaccagagaatactatcctctaaagcagggcttctcaacctgagcactactgayattttgggccacataattctatggtgttgagggctgtcttgtgctgtgtagtttgcttagcagcatctctggcttgtatcctctagatgcyatccatctgcagttgtgacaagcaaaaaagtctccagacatggccaaatgtcccctggggggcaaaatcacccccaattgagaactactgctctaaactgtgagtctgagtttcaactgatgyagtacaggttttacacataagcaaactacttacaatgtctgtgaatactccaggcctcataagattgatcatttttgcaacctggaaaacatccacagcattttcattctccagttgctgggacagggtggtaagggcacataacattcctgctgaaactgctccatacctgggggagaaaaaaaaaagatacgatttcagatgtacaaagggaccaaatatattgaaatgaaattactgtcatgtattttcatagaaactaagtagactgttttgacatttactctaaagacacgactgaatgaaatgctggtgggggagggatttggaagctagcataaaggtgagatttgtttatgaaagtggagtatcccaaattggttcatgagacgtttagcttgatatctaataggaaatgagaggttcagaagtagacttaggagagctaaagatgatttggtgttggtgatgagttgggtggtacaatagaaaaaacaataaagagaacctcttaactagacgttattggacaagcagccagtgatgaagggctctgaatttttttttaacaattccaaacagttaaattgaacttacagaatatgaaaaatttaaaaatggaattatatggctcaaaacagacaatttccaaaattaatttcatatgaaataattattttggcactgaagtggaactttcctaatgagagcactttctatgaaatccttggaaagataaatgtggttctctttgcctcacaaaaaagtcttagaaaggtagtaaatttccatcaggccaggttggcaactccacttttcacaagaatctgtgatggcacacagtttccacattagtgatgagaaaacagatggattaaatgaattgttcaagatgatgttgctggctggtggcagaaatgagactggagttcagatgccctgtgcccattgttttttgaaaaacttaaatgtcatttctgaattgttacataaaattaaaatattacatgttttatatctttaatacaaataagaccagagtcccccttagccaccccccaactttagaggtaacctctccagaggtaaaaattattacacgtgtagatacagccttccagatttaggtgtatcactacatttcagttcaactcattatttcatctgctacatgcataccaggtttaccttctagatggacatttagcttgtttgaatttgtgcactttagcataggtactgagtagaagggctagggtcacaggtatgcctgtttttagttttaaagacactgccatatttctttcccaagtggctgttacctgttcatactattcccagcacgagaacacttgcttctcctcatcattttaaacttgaaacacttttgccaatctgatgagtggaagactgtatcttactagggttttaatttacatttccttgattaccagggaggctgaatgtctttttatgaatactgaccatctatatttcctcttctgaaatcgcctaattaacacttttctactaagtttgcctcttccaaaatgatttatataggagttatttttatagtgtctgtagtacttgtgagtttttttgccccccgatctgtttctcttaacattgtttgtggtcattttgttatacggaagtacagtttagatgtaatcaagttgatacatcttttatttttggcttttattggaatcttgtttgagaatgctttctctaaccttgtattttaaagatactctcctacatgttctaattttacttttttacgtttaattgtctaattcatctgagtcttattcttgctttgatgtaaggaaggggtctgattacagttattttatttttccattggataaccagttgtcccagcacttcttattttacagtgtgatcttttctcactgacatcagcttcctttttatcatgtactacattcttatatatgcaagcctatttctgaactctgttttgaccttttattctgtttgtctattttttgtacctccccacgtgtatcccaattccttaataagtcttgatatctgataaagcaagtttctgtaatagtcttggctgtctctacatttacttcgtattgtttttagtgattcaaacatataattttcattttttactggtacactgatgtccaaataactctgaccttccacccgactccatcgtgtttcatagtaattttgaaaccagattgttaaggaacacaaacaaacatttttgttgggattttgattaggttgcactgaatatatagatggatctgaggaaattaccatcttttcaatcttgagtttttctcttcatgaacacaatgtcttttctccatttattcaggccttttatagcttttaactaggttttattgttttctttatagtctttgccaattccatttttggtaaatttttaggtactttagagtttattacccctattaatggcctccttttgtgataacattttctgtttggtttcacttcatgcatgggaaggttactgattttcacatggtgaaattgtatccggtcaaacagaagaaccctgcttaagttttaatagtttgtggcttctctaggtagttgaccacatctttatctgccaataatgcgaaytttccctctttttatcttttacgcttcttctatcttctgcttttactgtgttggctagcacctagataggcttacgtgctagaactgaaagcaagtatcatgtatcttaaatgttcaagcttctaagtttttaatattaaatttaaatgtttgctaatawacatctggtaaataacaattataaaggtaaagaggatgctttctatttttactctaagtgttttttttgggggggggggatcatgaatgggtgttgttttattgtacgcttttcaatatcgatttttttttgaaatgtctcttaaaatgtcctgaattcactgataaacttttgataatatatcaaaagcttaacaccagctctacattactaggataagtttttcatgatgtgtaattcttttaatatactgggttttattagacagctttttattgtcatttttgcatcagtgttcaaataagcaagacttggcctatacatttccattctggtgctaagccttgtttgtttaaatcaacattgcattaaatcttctgtgtgttactgttcatatgtagccttggccaggacttgtgggccctaacaggtggaaaactcattcttttattcagttcttagtgatcactaacgtgtgttgtacttcatgtgccatgttctcttataggtatttacatgtactgacttagtcctcacagtaaccctatggtatgggtaccagtattatctccatttcaggttgaataaataaggcacattctgaggttgaataaataaggcacattcaggtgaagtaactggccaagatcgcatagtgagactagagtttaaaattgagctgatacttgtaaatggctcagaacagagattggcacacaccacataccatgtgttcactaaatgttattttactatgcttatttataggcttaaacatttattagtatagagttataaagtcttaaatgcttattttctttcttttaaaatatgtattatttttagctttttattatagaaaatgttaaacagacaccaaagcccaatagtacagtagcattcatgtagtcatcattcagttataatgatcaacagctcatggccattctcatttcatttctgtttcgtccccaatatatattgaagcaaatctcaggtgttttagtcataatttagtatcaaactctaaaagataagcatttaaagaaaacacactatcacacctaagcaaattaacaactttcgaatttttttttttttttttgtgacggagtatcaccctgtcgcccaggctggagtgcaatggtgcaatcttggttcactgcaacctctgcctcccaggttcaaacgattctcctgcctcagcctcccgagtagctgggattactggcgcctgccaccatgtccagctaatttttgtatttttagtagagacggggtttcgccatgttggccaggctggtcttgaactcctgacctggtgatctgcccgccttggcctcccaaagtgctgggattataggtgtgagtcaccgtgcccggccaattcttgaatgtttttaatgtagctacagatatacggtaggttttttccttcatcatatttccaaaactgtatctcttactaaactatttattgcttaaattttactatcgccttctatttgcttttaattccttgtactttttgttgatttctctggtgctttttctggcttgagctgaatgcttggtttgtttatttttaacctttctaatatgtagagtttacacaggctgtttttttttttttttttaagtacagtttggctccatttcaccaggttttgaaatgcagtgccttcatcatcatttagttttagacactgtgaaatacttattttggttacatctttgatgcatgaattatttataagcaatcctagatgtaaggatttcagtttctagttgtttctagttataaggatttgggatgttatttcactggtggtttctaatgtaagtgggttgtaatcaatgaatgtagccttgtatggtatctgttttgggggaatgtattgaaattccatttatggcctatgtatataaataaaccatttgtgtttgaagagactctaggtctctctgtgcagwctctcttgggtgcgaacttctctatatcactattagatcacgcttgttaactgtggtattcaaatctctctgaatgctactgatcaaatgtatcctggtcgctcagtttaagaactgaatactttattctgtttttagaaaacctcagctgttatttcttcctctttaacctgtattttattgccccatggataactttttagacatatgttagaacttctgtatgtgacttccacattctagtttcatttcagttctacactccactagtatcctatcttttaagtttttagtttcatgaattaatgtattttctcattcttaggccgaatttgttcctatttcataataaatgttcttcatttcataaaatcttcctttagatctctgaggatatattttaataccctattatgatagctctattaactctgatttattgtggtttttggttcttgttcagcatgttgtcttccctcagattctaaattgtactgagttgacctcattttagcatggtattaaaaaaaagtcatttgtactgattttgtttaggaggggaagaatttaacatttgtttaatctgttctagtgaaatggttaaacttaagaatctccccttttttcttagctctttcaaagctatctgtggccagccatatagaaaagtcaggtaacatgtatgtttttacggagtatgcatgcactccatgtgagattattctcacctttccatgggttgcctttcctgtatttagccacggttaaataagcagtaaaattaaaagtatttatacaatatggcttaaacatgacaagaaactcgcaagtcaaatcaatcaaatgcacagrtacttttaaatatcttctgcataccaaacataatgacagagcaaagacaaaaagggccattctctttcaaaagtttaggaactaagtgggattaaagaatgctcatcgagtttcatggatttgcatttaaaactacagggacttggtgcaaaagtggtataagtaatctgtaacctaggtaaaatgacagtagtatataaattcactggctttgatattttgtttgccacttcctctaagggctccattaaaagtaatgcttatttaactagtgatgttaagaaaaaaaccctatttttttcatctttccctgcctttatttacttcaaagattttacaaaagaaatgaaagtactttaagctcctgaagtacagtaatgttttttttttaagtgctctgtctatattcattttaaaacacattgtgattccttgtatagtcaggataatacctgtgagcatttaaccattttcactatttcatatatttacttattattgtagcttttaatacgttgtttttaaaatcataaccaagattgctatccrgagttataaccctgacactgtgaagaaatgcagcttccttttgaaatcagtagggcagaaaggaaaacaaaaaaattgaagctggaataagtatcaatcttagggaagaagacaacatgaaagccttccataaggctctcaataaaagcgaaaatactggaattagttatgatttgtgggtgtctttgcagcctttgctattgaaaacagtccatatgccttgtgtcacttaaagaatatctcagcagtctttagactctttgatctcagggccaaattaaaataaaaaattattgaggacctccaggggatttgggctgtatatgtcaatatttactgtattagaaattaaaactgagaaaatgttaaaatacgattagccctaaaagtgatgttatcacatgtcatgtacttctggaaaactctttttaattgtccactcatgacagaatgggtatgaataaggcagatagtatttttatattattatgctatccagtagggtgatacatgtatctccagagtgagtaattaagtatttgcaaagggaactcttcttcagtctgtgagtgagtagagtaatttgggtgaggtctgatctacagctgtcttataagactatatgagaaccatgcctatgttctaaatatctatgggaacccrgctgtttttaaaatttgacaataatgatgtagatcagcctctgagcagaataatcttgaacagttgacaatagaatgctgagaatgaagcagtttgtctttaagctgtgcctgtcctcaaatagaagcagtttactttttggttaggaattttattcttagctcacttatctagaaatgtcatccacctgggacacacctgagaccccccccccccaacaaccacctgccacccccaaaagtaggtgttaaaaagatctctatgaagaccaaatagatgtcacaacatttgcacactaaaagttcaactctctgcctcacagatcaaatgcgtgcaggccttctctccaagcctgttgactcctgcttttgacagagcttaaaaacactttgaaaagaagaatttaagcagccaaaatgactttgaacaataaatgagacaaaaagcaaggctttctggggacaatttgttataggggtacatatacttaatagtttgtaagttaccacaatttaaaacacatacccgttcgtgcaaatacttgtctagtacccacgctgtcccaggcattgggtttcccccggtggagactgggatgaataaattaccattgctggcctcagcaatgtgagagtgacagtcatgtatacaaataattatggtgtgacatgataagcaggaatgacatttatctggtatggttgtcatgttaatgattttgcttagcacctctgggatgaattagagtctcagagagtgacttttgaactgtgtattgaatgaaagggtgctcagaggaaagaggatttgcaggggcaaggtggcatgcaggaagtacttcagtggcagattgggatgayaactggaaatgtaaactttacactagattgtaaaagattttcaaaagtctactgaaagaatcgatggcaccaagaagacttggtggccaatcagacttggaggtgagggagactcaaaaataactctgatatgtttctggtctgtacagttaagttgattaggggcaggcagtgaagatgagtttggttttagctatgctgaatgtgacgtgtttgtagcccatcaggaagtgatgtttagaggtacagaaagtaggtaagatggaaactgaaaaggaactggtgttcagagtatctcactagagctagcaactgttcaaaaattttaaagtttctcttcaataatttcaatggaattaacttatcccctacagatagtagataaatgaattaatacatttctactggtggcttttaaggcatctcacctatatgatatttgcagatctactggtttaggattaatttgctctttttgtatacaggcctaagaatgaggcctgtatacatctgattaattctggaggggatatattttcagcatgtgacataaaaatcactaaataagacaaatatactgaaaagttgaatgaagataagtgaatcaaacacttctgtttagtatttaactggtggttatttttcttttcctctttccttaccctaaaatataagattaggtgcattactgacttcaggacaaaacacctcggagtactaccgtaacagcaaaatcagtcatataactgggcagtaacgttagaatttgatgacaagagatgataagagctggtaaaacccaggaattctagaaaatgccctaactttatgctgtaactgtataccacaaagttttagttcagtagcaactccccagttattttgaggctgtctgtgctatttaaacactgttgatggttgtcacatttccattgatcttatgctatttaattaatgtttcaactgtaatgcttttcaaatcttaatttttcaccttactaatcaagagtcaggccaacattttgaaagactgtaaaattttttggaagcagctagtacacattacttcaagtaggagagtactatgatttgaggtgaaggtgctgagctcttgtgtacatcatgatacagcattagtgccaggaaaaaaagccttcacaataagcttcactttcaaatttattaatactttatgctacttgggtagctagttggtaatttaatgaacataatgaatgctgctgaccaagagctaccttggaactgaaataaaaatgggaatgtataattgattccatattggctaaaggtttgtgatttgaaacgattcaattatacaactgacttacaggccatgaagtttggctccaaatatctatatacaataagatatatctatgaccctttccttcttattaaagtggaaaggtgctgggctgggataccattgtgacacttagaagctttgagaccaggtgcaagttatttttctctttgagattcatattctttaaatcccaaaagacagtactgaagactttaaaacacatcatgaactttaaatattatcattaatactagtagttttatctctactcatcaactaagtcatatttttaaaggttatttccctaacaagtgtttgaaattcagtgtaaggatttttaaaaagtatttaattaaggtaaacagttattaatttactcatttgttactaacacataacacctctaaatgcatgcagatctacctctgtaggctaagatataatactttcccctttctagaacatatactctagaagaacctggagtcttggaagagtttgacatattaaaatgtaaacagagcaacaacactttgtacatgtccacagtagaaataacatggagttgtcacaagctgaggttgttgataggttttaaaattctggcttccttttctactgctttcaacaagaaattaaacaaaaaaacggtctacattttaaaattaagaaacagatacatactcatcatgaacaatggtgggaccatcccttgttaaggcctcttccttgatgacgttgataagttcaaaggtactacttatgggggcatctgggttaggccatttgggacactgaaagtgccgaacttctaagacatagtcatcctgtaaccaatacaacatgggtcaaatcccttcctttatttcacatatctacaatctaatgactagaacttgctcctgagaaagccatgtgttataggtaactctcaacaatgttgtgttaaccaaaccacagctggaaagaagaaaaataccaggaaggttttttttktttgtttttttgttttttaaaaaaagcatggctaggcatagtggttcatgcctgtaattcagtactttgggaggccaaggtgggaggattgcttgaggccaggagttcaagacccacctgggcaacacagggagatctgtctctaaaaaaattaaaaaaaaaaaaaaattaacyagtcatatggtacatgcctatagtctttgctattcgggaggctgatgtgaaaggatcgcttgagcccaggagtttggggttacactgagctttgatgatgccactgtgagtgagaccttgtctcaaaacaaacaaccaagtaggtcatgctagtgaaacaattcatttggcttagtcaaaaatttcaagtgacaataaattattaaagaccttatatcctactctattttcttatttataaaattaaaggaaaacaaggaaggggctcatcctttaaattactaatataagagcccccccatgcttactcatcccacaagaaggcagcaaaatatttacttaaaaaaacttaktattatcatctgtgcaacacattgcaaagcttacatttctgatggcaaagaaaatattgagttctagtatattgtttttataattaggtcaacagacctatttgtatgcatgctgaatcagaggaactgttacatttcatctagccagctggaaaaagcaaatatttgaaggaagaaaaacggaaaatgtacatatttaaaattaagtcttactcaaatgcctgagcctggcttgagggtggtaaattatttcattattacttagaatgatgatccagggcccaggtatggctattagtgaggaactgaggtttaggttacctgtgtagcttcaaggataaagtcatggatgataatttgttcttcattagagaggcacagtctgtctttgctgataagggtgacggtaaaggcctcacagttcatggattcttctcgacttggccagtacacaaactcatcttctgcctttggaatccaaaaaaaaaaaaaaaaaaaaaaaaaaaagcctctgcagttctgtcaaggatttgttttctatttcttgcatacggattttgtcatttcccatccctctcaagccatcgtttaaactgaattcataagagttatatgttcccatcgaactacaccaagttgaatggttattgtattctattgtaaaatatattttgataatcattttctagcatctctcacctgttagtgtagcaacctgaaacactcccactataggggacttattacagttgagaagtattctgtamtattgacatagtaaaaaagaaagcaggatctaggtcagttaattttgttatttcacaattgcttaagcaatcaagacatgctaattatttcctgtggattatgttaataattctgtagttgaactgcattttgcaaaggactttcataaacactrtaagttttcttgtatattttcagtatgatgttggatacatacagatagtaaaaaggttactataattaggagcaaattaacatacccatcatctcactttcatttttgtggcaggaacagctaaaatgtactcaatattggcatgattcccaaatacagtgcaattttattacctgtagtcctcatgttggatatgagatctctaaacttgttcttcctcatctgttgttttgtatcctcttgatttattttacatcttcccatttcctccctaccccacaaatttctttatccatttatctgttgatggaaacttaggttgtttccgtatcttggcgattgctaataatgctgcaatgaacgggagtgcaaatatctttacgaggtgttgatttcacttcctttgggtatatgcccacaagaaggactgctgggtcttatggtagttctatttttaatttatttagaaacctccagacagttttccatcatggctctagcaatctacattcccaccaacagtgtgtgagagttttctttgttatcctcaccaacatttggtatcttttgattgtttttaatagctatcctaatgggtgtggggtatcttgacttacatttccctgaaaattaatgagattgagcatcttttcatatacctcttggccatctttatgtcttccttggagaaatgtctattcaggtcttttgcccatatttaaatcaggtatttcatgattctactactgagttgtatgagttctgtacaaattttgtatattaaccctgaggagattttktatcacctgtctttacagatgaggacacaaggccttggggagggggcccataaattatctaaaatcactctgctaataaatggtaagggatagaacttttttggaagattgtgtgtgagtaagtaggttggctgtatgtacaaggcagttttaaaagaaatctgtcaatgttatatttcaagaggggataacatagaaagtctttcagccttgaatcaggcaagctttaaatgttcatccattttaagattaaaaatagatatgcaggcttggtccttgaattctatccctaaaaactatggatgcctaagagaaagttaattgttgcataggttggagactgtgagaaatatgattatgatgtacaccacgtatcctaatcaatcagctccaatggcaaactgtagttttcctgtagtatataggtttctacgggcattttcctgaggatgcctagctactatcattgaagtcagaaataattctgaataatgttcaaaacaaagaaggctttgtttaatcttacattgttgcattagaaatgagccaacgtccaatgagacttatcaccctttcaagtttcaatatagcttattgccaagtacatttttatttttaaagctcagcataaggggaaacagattagcaactgggtttagtctatacaaaagaagtctgtaactgtcgtgggttttaataggttttgtccaaggacacagatattaaagacataaggtaatgaacagggcatctaaatgtaacaaatatgcacagattaagcataggatttatgagtggatgtgatcctgggtaaattaatctgaaccttaatttccagatctgaaaagtgggaataaaaactacttactttaaagaaatactatgatgataacatgaatagtaaattaactagcttaaaggctaccaaagggatttgagttatggtagaagaaaggtagaaaaatggttcatcttgaaagtctaagaaaaataaatgctgcttcttaattcagcaggcacactggtctcatgactgttttgcttacaagtatatttataggtcaaagatatctgggcatctatatccgtactttgtgagttaggaagcagtgacttttgggctccttacagaattatgacctggtaaaggtatagcagtaataatacaacaaacaaaaagaactcagagatatcaatctttaggaaaaactgtgcaatgatgaaactctccatctcagaactgagaggtcagttgtatatgattctaatctagccttccgaggcctcagagagacactgagatgccatgttcctatatcctcagtgtctgcagaacatgtatccacttatttggtccagtctccctccagcctccccatacaaatgagctgctgggtagatgctttatggtgattgccctctgttaagtgacaataacaaaatactgattcatccaacaaatgaacgttttaacaaccctaagtgcctccaatttccacatgccaaacagaatagaccctattgccagctaatttgaaaatttacactccagcttttagtttaagattctcaactttgttgccattccatcatacagaagcagtcttggtatcctgaagctggagcaaaatgcgacaaagtgaagaagttcctactgactgggcacacagtcaaatgcatgtcaccaagactgggggttcagtcacatgctgttcttccttgattaaaaaactcattaatctgactatcataaaggcagatcctcactgttttttgtttttacctcatgggttcacatgtccacacagtaacttttatagacccagctaattccgaaacttaagtatccacaagatctaagcagaaacatttaagtctgttttataaacttgctcacccttctgtatagtttagagactgaaatagagaaggactaagggagggaaaagtagtagcagctcagtcctaaagacctttaagtgggaacaaaatagcctatccctgcagtagacctgacttgcctatggagtgggaaaaaaaaattcactattagtacttttgatacaatattttggggtaagacatacagtaaaatgattatataagcatggtctctggagacagatgactcaggttaaaatcctggctccagttacttgtgtgtgctctcttgagcaagtttgttctcagttttctcagctattacatgagataataatagtatgtatgtcttaaaattgttgagaattaaacaagttaatgcatgtaaacacagttacatactcagtacctgtaagctacaattatttacttttcaaaagtgacatacagcagggaagaggttggtgtagtcatatattaatgaggttactaaaaacattttcaaaaccttctaccacaccgccacagacagtacaattgaagggtgatatcaatagcatcagagactcaagtaatggaactgatagggacagtattgtgagactatgaaaggaatctccacagacttcaagatgagaatttaaaaattttaaattccctccctagcatatatggatactatagccctatggcaaagtatcaaagtaatttatgcttgtagcctcatgggctcattaatatatagcagatgtgctttacttaccaagctctggttgtctggcagcatgacaatgatctgtgcgttatgatcccaaatcattcgccagaaatctttcgtagtatgtggcagaggatgctgagttataataaattcattgctcctataatagcccttcagttgggaagacaaaaaaaatcagtgaatatgagtgttttattctaactttgtggtagtaaaatatattcatgaaataagatagcactgttttgactacactaaaataattgagaaaggcattcggtacatttggctaatttttagatgtacttctgctagcactgtgcagacaattttctctccatgtgcagttcacttctagttaaccctgctgttttcacttaagggaaatttcaacatttattcaaagactagatgtgtgaaattaacaataaaattaattccttaagaagcattctgcttaatttaagcatttttgtaccagcactgattaggtatcttttgttaaaagtttcaagatacagaaatctctatacttttcatattacacattgagaaattatttcaaaaatgacatcagtcacacaggtggtatctgctctttaacacctttcagtttagttgactttatttataattaactgttgactctcaccatgatataagaagcattaatgtaatctgttcctttcattccaggcaatggtgcaagacccactcgagcacgctcagctatcatatggaaaaaacaaaaacaccacatttgccttattatacacacagaaccaacagctctttctgagatttgcttgatgaataacatatcctcctggcttccctttctaagacttatctatatttttaaacaagctaaagtgttatcagctgaggcagaatgtaaaatgaaattttgctgcacatacccagaaggacacaggcattgtaggaatacagttttactgtgggagagatttttacagcagatcaataacagaatactttatatggacacaacagaggattttagataacttttgactctagtttgttattcctacaattataccaacatatactttgtccttttaccaacccctttctccatgtctttctgctcatgatggtcttagaaaagagtggcctttttcattagagataaatctcccaaatgatcacccatgtctatgcctacagcacacagacagcatcctctgcaatgtccttagctatttatacaaaggtcaccaccaatcaacagtgccttgatctcaatagccacagtaactgaataaggtagttctagttgtacagattaatccaggattctaagttttagaggaatgttaatgccacagcaataacagctttattattattttttatgttataatatggtagaagtaacccaattcttgcattccaaggtgaaatgaagctgtattctacgtcagatagatggagcacttgctgacactgacaaccacctctcccagtttcattaaactaccttagttgaataagcataacattttcccttttggtagtaccaggtaagaggctggtataaagtcatacattaatgaggttactaaaaggacattttcaaaaccttctaccatacggccacgtacagtacaattgaagggtgctatcaatagcatcagagtagtggctgcctctgtacctaacatacaatccagtataaaagatcactaacaaactgttttaaagtcttacatggcacaactgaagagtttctgttcttttctttgttacactctttctgagcactgaaacattccacatattttgcattacactgtgtgaccagctgaaaaagaaaaaacattttagtcttcattcaaagatataattgatagcatttgcttgatgctttggcaaaaatcccaatcagattactgataaacaagaccatttctgtgccacaaagaaccttttaagacacagggtcttgctctcttgcccaggctggagtgcagtggcatgattgtagctcagttaactgtgatcctcccacctcagcctcctgagtagttaggaccacaggtgcatcagcacaaccagctaatttttaaaattgtttatagaattggggtcttcctgtgtttcccaggctgctctgggattacaggtgtaatctaccatgcccagccccagagaacactcttgtgctttcctagtggtacttctctcagtgaccttgattgtatctttcttatttctactatcaggtagaaataggtactgtgtgcaatagatatttctagaactatgtggattcttctgttatgtgatgtcactgctgctgtgaatttttttctgtgattcctcactggcataaaagacctacgtgagtctacattaaaaaagattgcttaatgctattgattacgagctaatcaagtttcttgaagataaaggagtacttaactagttctcagtacatttctgttgaactgaactaacattgttctaaggcttttataagtaaccagcccagtagtttgattattattcctgtttatgtagcttggttgaaccattttgtcaatcctattttttgggggctggcatccatcctaatggagtatatgagatcagtgttcttctccagatgctttagtaaaactcatggtccctggatataattttcattttcaagtttgattcttgtttttttcttcatcttgagctctaaaatggttagtgcctgtaaaagaaccaactacctggtcgcatttcttaaatgaagttttaaagtatgtataaaaaaaaattgaagaaacgaaaaaggcagaatttaagaaatgttggtacttaatattttgtaagaactcatgttaaacatttaaaatgatacactgtgtcctcattattaattatctcatggttttatagtagaatgttaatggggagctaaaaatttttaattttatgactgaactcagtgaaattaaactatttttcatttcatatcacttggtataatttgcttggcagtctcatttcttcagctgagattcaaatgaaagtttcagtctatggaaagttttaccatgaaaactaaaactgtagattcatctcattctttgaatcttgatacaaagggagaaactatttacatacagaacaatgtgcaaaatagaatttaaaagacaaagataaataggaaagcacttggtaactggagagacaggcgatgtttgaaagttagaagcaattttgatttattatcagatgactgagccctaattattttaatagtccttataatctctctttttcaccttcacttcagtcaattccatataaaccttaaccgcttttaagcttcttcatgtccctatcaaagaaaaagaacaaccatttaggaaaagttaacttttctctagtattgtttagtaattctttttaaattcctaaattatcttctgaaatagtttttgaaataggcatatttttaggacaatatgtctacaagtcatcattcttaataattaaggtaagatagattagttcagaaaaaataggacattttttggactaaacgagttactttaaagtactatgtcattatggccaggggctgatgtttatattcagataaagtcataaattgctcagaagaaaatacaacactgtatatctacttgaataccaacaattcatacataggtcaaaaccgtattttctttttcatcacatttaaggagtacaaggagtacaaatagtaatccatttcggtgtatacattaatgcaaagaagacataacccccaaactcaaggcatttaaaacattttcttgctttatgccaaagaaactttttcaaagcactaccttgaattgcttttccagtcgtgtctttcctcctactcctggtataaggatgctgttaacatagctgtgcagctgatttgaagatacttcagtctcctttccaagaatggcttccaacaaggcatcatggatgaaaatgtactgctcctaagaggtacaatacatggtagtcactgagggagtgttaagggttagccactcattcatgaagtgtaccttagtttaattctgctgctaacagggacctcccagtgatttccttcaagcacttacagctaggtgatttgctccaatactcactttatcagtcttaacttattttacggtagagactgtgttaagtttagctctgtattctatactgtgcctggatcacggtattctatactgtgcttattgcttcaactcaataagcaaacaaaaaatcgtgttcaatgaagggttttagaaccatcctctcctatgtatttctcaggccagacaacatgtttaactccccctaccatctaacacagctcttgaaacaactgtatctctttcgtaagtacttgtgtagttatttaggaatccaaatgttaagatccatacagaaatggaaaactgtgatccgtagaataggatcattgtcagaatatcttctaatacaaacctgtaaattactgcaagccctaaaagaatgaatctgtctcttcattatcatttaacaaatttcagttacagcatttgccagaatgtcgtgaggacgctggcagctactccttacctcagtctggacgaggtagttacgctgtgtcctgatatgcttcaggaatcccaggacgttaactgtgcttttgtcttttatctgttgcagcatgctgtctattacaatataggtgcctgttctgcccacaccagcactgtaagaaatgaagacactcaactggcacttttgttttatcatactgttaactttggattcgaaaaattccaatctaaaccccatttattttattatttttctgagatgagatggagtttcactctgttgcccaggctggagtgcagtggcgcaatctcggttcactgcaacctccgcctcccagttcaagcaattctcgagcctcagcctaccgagtagctgggattacagatgtgtaccactacacccgactaattttttatctttagtagaggtttcaccgtgttggccagactggtatcgaactcctgacctcaggtgatctgcccactttggcctcccaaactgctggaattacatgtgtgagccacc

SEQ ID NO: 97455 - DNA, 41744 bp, Homo sapiens
aaactcaagagtttaagctaatataaataactggtcaccacggagggatacttgtaaaccaaatcattattttgaaattggcaaataaatgaaaagattaattctttatctttctcttcttatgaaaatagtatcaatgaataattcaaaggtagatgaaaggaagtttatcttaatagaaatattgtagctgataaatgaagaaggaattttagaattggagtatcaccatttaacaatgagttacgcaagtaggggttcatcatccatagttgttgatatcacaaaaagaaaagataaccacatattacatattctgatgaaagaacacaacacttcctacaagctagtcttgcctccctgccaaaagaaaatatatattaaatacacatacacatgcacataatctgaacatgattcagatgaatcagccactacaggggactgataaatatgtaaaacgcatcatggaaagacaatcagcataatccagattgcagaaagctctagagaaaactattccatttctgcagcaagtgaattacaagggggaaaggaaggcaatcatttgcaatgtctagaccttatttggattgtgattcaaataataaactatgaacaaaatgcaaaacatttataagatagtaatataaacagtggatagtattaagtattgttaatgttgtctgacaattatattgaatttatgataagaagagtccataccttttagaagtacatattaaaatatttaagaaacaaatgaaagaattaagagctgggaatataggcttaaaaaaaagaattggctgtgagttgtaatttttaaatctaggcgatgagtaaaatgggggttcactgaactattgacttctttattaactgcttaaaactttctataacaacaaaatattttaaagaaggtacagaaattcacataaaatatttcttgagcttattttagctggttctcataatcacatcaccatttcaaactttaatatagccaacacttgaaagtatgaatgggcttgacatttcttattttcttccttcagacataaattttccttgtcctttctaatcttatatctaatgaactcttcagttacatttatcattcaatattttaaaaccagagttcccttcaggatgacccttcaaaatgacctttataatcacaaatttgcttctcagccctactccagcactatgaatatctggaactaaacatacaataggttgtatcaaaatatcacatgtactgcataaatatgtacaattataatatatccacaaaattaaaaattaaaaaaatttaaaaatccagctggttattacaatgcccactttaaatatgtgattgtgataaaagccctttagccatgaaataagaagggcctgaacaagcagtgaaaagcaggctgccaatatatcagtaacttcactctcttggttgaggttcaagtcagattcaatttacaccaaattctgtgcaaagtaaactctagtgtctaaatatcacaacaaaccctcaaattctgttgtaaattattctaattcttagttccttattatagtaccaggctctgtacttttggctctattgactgaaagcaatgctagtatgtataaaagagaatcatactattctttctttttttttcattttcctagtcaatggcactcccagcaggacaaaatttttttccacttttattcaacaattattcaggacttattgagggctctaaggagggaaagcaatcattacactaagtttgattagatagtagaaaagaaaaatattttagaaactaagaaatattagaaaaattaataataatttagtctggcatgtgtaaatttagttagtcctaaaggttctgggtaacctttgaaacaaagccagttttgcacaaggttgtaaaattaaataatttctgttgatagacataaatcaacattcagggcaaattgaaagagtactagatttaaaaatggaaattactaagatgtatgaagcagctcctagtgtgcaaaagtgctcagcaaggcttattggaatgaagtagaataaaaaagaattcattggattggaccagttggattgattgggttacttgagttgaatttattgggtttaattgaaatgagggaagaactttttctgagaaataataagaatatgaagatggataaatatgagacaggcacaactctgattcaccaaattaaaacttttattcaaatttggattaaacaaacattttttgagcataatctaccaggcactattgattttgtaactttggtttaaaaaaccgactatctcagcagctcttttaggacaaagttgagaagacggaagtgacattagatcagcaaaaatgtcattgtgataaaactcctccagccatgaaataagaagggcctgaacaagcagtgaaaagcagactgccaagatatcaataacttcactcccttggttgaggtttaagtcagactcaacttacactaaattctgtttacaaaaaaaaaaaaaaaacactaaagttttcatgtattaatagtgaggtagacttgcagtaagtttgttcagtaaaaattttaggcttaagcctatcttcaccatgagtatcatgttcccttcagaatgacccttcaaaataacgtttaccatcacaaaaaatctgaagcaaagcaaaaagtctttgctttaagacttttactaatttatttttactgaatcttgttgcaatatttgtgcaaaatcttaaaaagcacaaatactgcaacaagatacagtagttaaataaatcacctcttttttttccccttactggctgataagcagatttattcaatagagaataccttttaacagtgtaatgagttcccagatgggccatatacaagcatgtatagatagttgactcatctccttcaaattccattcctatttgcatccattaatttgcaaaggggatagaatcctcttgataaataactcaaaacatttgtgcttatagttaggcataaagaagaaggaagaaccaagagattctaacaagatgtattctagggttcctgggagacaatgcaatttggaggaaaaaggccttaggcatggtgagttggactaagaatttctgaagggatttattagttacagtgtggcctggtggctgttacagaacttgacccaaaccagccattctggggagtgtgtcttgaaaaagaaaagccagtaagtataactaaaaaagctgtttggataaattctggaatgagttcccaaatgcgccatatacaaggcccatttggtgcccaagcctctcttctgtgaaacagaagcctttcttctgtgaaacaaataaaggaccaatttcctagaccttgaaatatggataaaaacaagcatccctcaagaggcgagagaagtacatcaaccaaaggaggcatcaagcaatatagtccagggtgaagggacaacaataaagccaagagcaacttgaggcagctctgaggatgtgttagacaatttgggagtttcctaaagttactggaagggaagggaatatccaacagaagtctgagagtctacagttatacacactggtattagggagtatcgaaacaggaatagtgtgattggttaacaagtttccaattaggttgcatgcataagttacaggcatgcaacaggatactgatctcttcatctctttcatatatattcacatgctaaaatttctcatactctcaaatatggccttttactttctcatacttttcactgtctcacactttttacaatatttagtgtatgcgtgtgtgtgtgtgtgtgtagacacgctacatattgtgtccctattttcctagttttatataaatattttgtgagaatagttgaaatggaaatggaaatgataagagtaatatatctgtaagtgagattttaccaaggtctaaaactgtctaaagtcacttaacaaggttaagtgatttcttgtggtttaaatgcttaaacaagctactatggaaattagtcttaggcaactgttcaatgcaactatatagcatagagattaacagtgtgtttgtggagccggatagcctacatttgagtccctgtcatgctaaccatatccattttccatggggaaaatcacttctctaagcctcaatttgcatatctgtaaaattaatataagaagaggatctgaaaataaggttgctgtaaagaatcaattagataatccatggaatgccctcatcctagttcctggttcttaaaaagtgttcaataatgttaaactatattgcctgccaattttttatatctattttcaatgtgttgctttaggttatattgctttcaatttataacagtcagaaaattaggggaaaaatgcactctaaattttctgttcccagaaattgtagaagacgaatagacctcaccttaccaggaaaaactaaattgctctgtttttgcagggagtgaaaacaacatgaacagtttcaggttctgcaatgtgccatctacaataatctgaagcatgaattctaaatgtcctaaaaatgaacacataactgcaccttcttgaaagcagacaagtaacatccttccttactcctgaatcagcctcagagacggccttaatggtgcataacaaggagacaccgaaaggcacattgagccagactctgataaactctgaagaaactggaggtaagaaaagaagaaaatcaatactgatccatacaaatgagagcaatacaaaataaaatcaatcaattgtgagataaaaaatatatcataccttatcattttgttatactgaattattaaagagaagtctcaataacacgtatttttaaattttgaattaactggtagaaaattcaaaaataacaaatatatgttttttaaatggaatcaatattttactatttacacctattctgattttaaatcatccagcacactctttggagatcataatttattttataaattcgggtaaaacaattttttccttattaagtgcttgatgatagcattaatgaaacactatagttacatatgtgtttgcttcatttgtgaaagccaaattgccctcattctcaacacacacacttgtagaatgtcaggactgaggccaggtttcaaatgtgaagtaaggattgtgggtggactctggcagttattccacagaatttgtatgtgtcaatcttagtattcaggaattatactaccaaactagttcatgtgagcactgtgctcttctctactgcttccaagcatgttatttttggtagtatttatgaagttctgtgaattctaaggcacacctgtatattatgaataaatcctggagagaggttgctgaatgaagaaggcagggaaagtagcatatgtagataaaaggctgagtgtggattctcatcaagaaatgggtggagacagcactttgggaggccgaggcgggtggatcatgaggtcaggagatcgagaccatcctggctaacaaggtgaaaccccgtctctactaaaaatacaaaaaattagccgggcgcggtggcgggcgcctgtagtcccagctactcgggaggctgaggcaggagaatggcgtgaacccgggaagcggagcttgcagtgagccgagattgcgccactgcagtccgcagtccggcctgggcgacagagcgaaactccgtctcaaaaaaaaaaaaaaaaaaaaaagaaatgggtggagagaggggccatcctgtggaatattaatagtggcttgttctattttcattgacatgaaagggtatagagacgaagatctggagcttcagctgttcatgccttgggtgagccatgaactgcttcccatagggaagcattgttcagtaaatgattgacatcacaggagccttaccaggacaacaacaagatagtgaatagtgcccacctggtggggcgcccactattctgtaaaatcacagccaaatactatactacagtttacaatgtaagttataaaataatcttttktgtgtgtgtgtgttgagataaattaaatggatgtaaattgactaaaatagagttggtggatgacaaaagagctataaagataagtacattccctatgtgctgtataaagtaggtttggggaaaatgtgctcttaaagaagtttttgcatagaatctttctactaactagctgatgacataaatcaattttaaagacatgaccaatatgatcccaacctgtaattaccaccagtaaatgaataggcttggcagggagggaaggaattaggatgcagatcaatctattgtttagctttccgttttctgtaggccctcacttttggacacgttgtcagaatagataagcagttagtttttctaccttcatcctatgggtaataaatacttaaacacaactcaaagtgacaacagacccaccaagcagcagaatccaaggtgaggacttgattgccacatctacagggctagcacagaaaactctgctgagaacaatattattcccactgcagggayaggcagatggtgacacacagatgcaggaccagatggagttgtgtgattctgtcttatcaacagaatcagagaaaccggggaatttccggggaaattactgatgaaaatagaactgttcactctctaagagaaacataaaggagaccataatggaaagttgtagttaactcttgtgtcttgaaccagaagaaaagttgtcccaccaatagcaacagaaagcattaccttctagtcaacctctggattcagtcccatcttttttgtgagaatgagtgccttcaggagaaacaaaaccctagcctgactttcctatagaaggacattgcccttgtgctgatctttccctcctatgatttcaaattccaatttaactatgttgactcacttttttctaatttaagtggaagagaacattctcatggagatttaaataaactttgatagatgtgttttctgcatttctctaatcctcaaaatcaaacaacctgttctttctattgagttttttaattcattcatcccacaagtatttcctgtgcttttgctagattttaggcaatgagatagattctgtggttccagtgataaataaaagcgaattcctgcctttaaagagcagatagtcttaattctcatgtttagctaatcatggtttctctaatgtgccatttctgccccatgcccctggccggacctgacacaaaagggtttccacaggtcacactactatttgtcttagttctaatctgtgcaaatgaaatgctcactacactttgccccaacctgcttccaacttcctgaccaccaactttaccactagttattgcatttctagccctaccttaaccagcagacttgaagtaagctactactttcctgtttaagatgttgctttgctcagtgacaattcttgctcttcacctggcaatacttcagtcttagattgtcttcagtatgtccttcctgcttcagtttatcctcagaattctcagatacctgatttcagtctcaagggtgaggttcagaagccgaggaattatccatcaactccaaagtcctcttttttgtttctctcagccaagtctactcctatggcatgtggtacccaggaaaatatgttttttgtggggctccctgtctatataagcaactttactaaaaatataagactcctgagaccctatgagatgtggttatttatcaatgaacatagatcttgtttcttcygcagttcactgtactatttatttaacactaattacattatttctcatggcactgtatcatccttcattcctcccatgaatactggctttcaatgactttcttcaaagttgttattgtgcttttttgatatgactataaatgaaagtctttatagtatgcaggaaaatgtgagttatcattgcttttctggtaaatttactgtcttgaattttacagcataaacataggacaacatatcttccaatcgtatcttatatttaaatttttagactataatcacatcatttctagaatgtgatcactttcaatgttggttatatcacaaccttgccttccacaccccaccacagtaaggacaggcaagaggcctgggagtagagcaagaagaacagttttatttgctcaaaacaacatctgtcctttgtccagcatggcttaagaccagcccaggaaagtctgatgatactaccacaaccagaggcaatagaggtcccagacatcctcaatgtggcctcaacccttgagaactgtcaaccagaggtacagcactagtcagaaccgggatgagtgagggataatgcatagcccacaaaaatggctccagctgaatggtaagtggctatgttggtagcctacagccataagctttccttgcctctgacacgagttagtcacccaaaatcagaatgttgcctccattttggtagcccaatattatgcattcctatgaaagacatacttcatgagccagcaggagaagcctacttgccaggctgcccttcaagaaccagggccgacccaagaaacctgggatgatcccacaggatcaaattctcacatttttgggcttctggtcaacactattgttacagacttgaaagtctgagagtaccccaaaagggaaaagaggaatgaaggctcacataaagccatagggtgtcccatctggaaggcactgccaggcctactcagtcccaggcactaaaagagcacttagaaaattttgacaaatgccccctaaaacccatggtcttggcctgtgccccagggacagagaccgtgcttgcttagatcaaagggcaatgttgctcaaaggtgaaacaaataagggagctgaatttgtcataccaaactttctgaggaaggtgatatcttcaatcaccttgtttcattatccctgatctgtcaagaaaaacagtactataaagctcaacaggatcaactctgaaaagaactaaaaaagaaaagaaggcaaaagagtgaggaaggtaatgagaccttgataatgagttaataatttgcaaagaaataacaaaaatgggagaggggtgccagatggctgactagaggcacaggacactcaactccacaaagaaccaaaatagtcaatagctaaccacattttgaatagaacacctaagagagaatgctgaaattcagcagataagtgacaggaaatacctgaagcactgaaggaatgagaggagaggtgtatagtccagccagcattagccagagatttggagcagctcctcggtgcagggaaaaggtgagagattcccagtggcctacattctcacctcagactcctgtaattctagtcatggaagagttcctcaactcccacaggccctgggactggcatagggagctgcctggaatctgcataagagcactggcttcagagtgggaactcatgctgggtcccacacacccactgagcaacaggcaactgcagcacggcaccaatttgaaagcccagcccccagcagactacatcctaccctgggaccaaacagcccctgcatctccacatttctggaggctcactaagagccctcatatcctggggactgcagcagcgagacatcagttaaatccagcagagcagcaatggtcctcaacacttcagcccacacagaaccttacaagcagggccaagggaggtacagtgtaccagggatgctgcccccaggacaaagggagcccaagtgcatgctccgaagagcctgaaacccccctgcctggggctgctatccctgacagcaacctcccagaatttccccaccctagcagcaaggctgccgcacacttgcaagtgccctcaccactgctgctgcctgggaccgaagcacgtggtacctagagcttgtaacccaccttcgtggggtggctaccacagatagaaactctgtcctcccaagcaggagggcctctgtgttttggcacacgtgctgaaaacagggtttccccacgcgttgccttcactgccacacaaccactcaaacacactgcctggggcatgggtgttggtccactgtgcttatgacagtctgcactcatgcacagcactgggcgcctgagaacaggcctgcctggcctggcaytggcccccagtcccagtgcacaaacatattcaggaattgtcctgcttcatcagttgccagaggcacacacacctaaggagctaataacagccccagagcacctactggttggccattgatatagcatatcttctggatgcctggagcttgcctcaccacaaccatcacagcctatgtccatgcacacctttggaagaacctgataccaggccttctccatttagcaccacccgtgctagtgcccaagcacgacacctggaagcaggggatcaccccaccctatcattaaccccaggcatgcatgcatatcaacagagagcctaacaacaggtttagaaaacctgctgtcagcacacaagcatgccattcagcatcttcataatcactccacctcatcaaccacctctggcatctggacattccttctggggacctgagcacggagttgtcctgcctgccaccaccaccaccacctacactcacctgtacacatcactttggggcttggggacaggcccattcagcccattgtgcccactgttaacaacagcaagagccaactgaaagcctgagaattgtcccactgatggcagcagcaggctgtctgtagtggccactgccactgcaccagctgcagtggggaggtacgagcagtggcagcaggagcagggacaagtgcatggaacatatatggaggagtcggagctgggcccagggtggtgccatgctccatggagccggcaggagctagggacaagtgggagcccctggagcccaccaccctgggggctgccacagtggggtcaggacgagccacccaccagtgggggagcagtgcggttgggcagaggggcaggcagaaaggtgcccagtgagaacctggagcccctgccccatgctgtgagcaggcatggccggggctgcctgcatgctccatggagcaggcaggagctccagcctcccaggtgcaggactcaggcatctctgcactctgcactctcgggggcccaggaagggccctttgcccccacaggcttgggagtgtcgactctcatggcctggcctctccctgctcacagagcctgctccaatcctgaagtaggawtggggccaagcctggtcactgtcactgcccagccaggtgtgtgcacattcagggcagtgctaacataacagccccctgccaccttggccccctctagactttgggcactgacaagcatacagggggaatctgarggagggctgagggcagcttggcactggcctgcaggtgccccttggcatgagcagcctggacatcatggatggtggcatgaggcagataggctcctgggcggaaacaggtgggtccccagtaaggccccaccttcaggtttgcgctgctagtcccaagaaacctgggatgggaaccggagtgggaacttgtggtaccttttcctgacccgctcctggtggcccaaggaccartcagtgtgcactttctcccttcttaggtctataaaagccttgggctcagccagagctaaacagatgacaggatagccagctgcagagaggagctactctctctgctaagagctgaaccctcattgggatgatcagatgcagagaggagctaccctctctgctagtagctgaacactcatgggacaccctagttctagaaaggagctgcccctgcgggtctcctctgagctgttctatcactcaataaagctcctcttygtcttgctcacccttcacatatctgcatagctcattcttcctggttgcagaacaattactcgggacccgctgaatggtgaagcyaaaagagctgtaacacacacacagggctgagacatgtcccttgctcgccacattgcaggtgacaagaaggagagaagagctgtggccctttggggtgcccagacctgggagctccctgagccagggctatgactccctctttggggccctgcagttcccggtgtctccaggcttctgggtgccacctcattcactggtgccagctggagaagctgcttgcagtatgcctggtacagccacagcctcccagaaagctggcacccatgcaggcacctggagctgcctgccctgcagcagcagccagcatgtctgactgcacagtggctggaccctaggctcactcacacacccctggctgctcaatgtttgactcacagtttcccttggaggcatgagttccaggctggtagggtgagctgagcacagcctgccaggttgagtgggcagaacaagcccagcaggcccaaacaagagtcaggcaaaggcaccaygggacacagaggtttttagccagagaaktgacacccaaasatcccgtaacactatcaccacaactaccatcactcacaccatgcatgctgctcagagacccaagaactcacacatccaagggacgaaaggactcacacacccactcatccccccactgccactactgacagccaagaaatctgcctaaaggcccaagaaactgcccatctaaaccacctaacaccaatgccaacatataccaccyggggctccaaatataaagacactcagactgctgttgccatcactgaggcataagaactagcctcggcagtctattcccagcaaaagctcaccatagcctccactaacaagtgcagctaaagccactgaggaaatcacagacatcactgacactgtttacagccaaagtaatcatacagagagtatactactgtgtgcaactggaatcaaagcaaagctcccctacacgaccaacatttaaatayatctacaggaaaaaagtctttctctacaaaaaccaattcacaaaattagaagtgagtgttacatccaaggtgctaatatcaatgaaagacacaagaaacaggaaaaagcaaggaaatgtgacaccttcaaatgaacacaataattcttcaacaacagactccaatgaagacaaaatttatcaaatgcctgaaaaataattcaaagtaataatattaaagaagtgcagtcagatrcaagagaaaacaggtaacaatacaaaaaaatcagaacaattcaggatataaaagagaaagatatcataaaaaagaaccaaacagaaatcctggaactgaagaatgtattaaataaaatacaaattacaattcaaagcttcaacaatagactagataaagcagcagaaagtttttcagaacatgaagacaggtctttcaaaataaaacattcagacaaaaagacaaaaaagmataaaaaataaaaagaaagccttcatgatttatgggacagcaaaaagtgatctaaaattcaaattttaaatgttccagaagatgaagataaattttatgacataaaaaactgatttaacaaaataatacctggaaacttcctaagtctagcaaaggatttagacatacagataaaggaaactcagagatccttaaatatataaaagtacaaaatatcttctcccttgcatattatagtcaaactatcaaaagttaaagacaaagagggaattctataacaaaagaaatgtgtctagtcacatataagggaacccgccagactagcagcagacttctcagcagaaatcttataggccagaaaaaaaatggcataatatattcaaagagctgaaaggaaacaaaaaatcaggcagcaatactgtaactcaacagtgtcttccacaaatgaaggtgaaataaagactttccaagacaagcaaaaactgagagatttcatcaccactaaaccagccctatgagaaatgctttagggagtgttacacatggaagcaaaagacagtatctacaatcataaaagcacatgcaaatgtaaaacacgcaaatgaggaagagacaggattcaaaagttkttttttttattaaaatgaaaaatatttatttattataaacctatttttttgtttgtttgtttttattatactttaagttttagggtacatgtgcacattgtgcaggttagttacatatgtatacatgtgccgtgctggtgcactgcacccactaactcgtcatctagcattaggtatatctcccaatgctatccctcccccctcccccgaccccaccacagtccccagagtgtgatattccccttcctgtgtccatgtgatctcattgttcaattcccacctatgagtgagaatatgcggtgtttggttttttgttcttgcgatagtttactgagaatgatttccaatttcatccatgtcyctacaaaggacatgaactcatcattttttatggctgcatagtattccatggtgtatatatgccacattttcttaatccagtctatcrttgttggacatttgggttggttccaagtctttgctattgtgaataatgccgcaataaayatacgtgtgcatgtgtctttatagcagcatgattcaaatgttatcactacagaaagccatcaaaccataaagataagcaataataaagaatgaagacaatataaatgatcagaaagcaataaacaaaatggcaggagtaagtcctcacatatcaataataactttgaatgtaaatggattaagtattctgcttaaaagacatggactgctagaatggatgacaacatgatccaacaatatgttgccaacaagaaactcactttacctgtaaagacatatagactatacacagaagatggaaaaaatattctatgcaaacagaagccaatagcaagcagaagtagctatacttacattaaataaaacaaactttaagacaaaaacagtaaaaagagacaaagaaggtcataacataatgacaaagggagcaattcaaccaaaggatataacagttctaatataaatgcactcatcactggagcacctagatatataaagcaaatattataaatctaaagggagaaatagacttcaatatataatatttggggacttcaacacaccactctcagcaacagacagatcatctagacagaaaatcaacaaagaaacattggatttaaactgcactttagaccaaatggccctaacaaacatttacagaacaactcataaaagagctggaacattacgatagaccacatgttaggccacaaaacatgtctcaataaatttttaaaaattgaaatcgagtatctctcagaccacaaaagaataaaactggaaatcagtaacaagagaaactttgaaaactgtataaatacatgaaaattaagcaacatactcccgaacaaccactgggttaataaaaaagttaaaaggagaatcaaatgacttcttgaaacaaataaaaaggaaaatataataaaacctatgagatatagcaaaaacaatgctaagatagaagtttataacaacaaatgcccacatcaaaaaagtagaaagatgtcaaataaacaacctaaagatgtacctcaaggaattaaaaaagaagagcaaaccaaacctaaaattattaaagaaataataaagatcagagcagaactcaattaaatagagacaaaaaatacaaaagatcaacaaaatgaaaagttggtttttgaaaagataaacaaaatcaataaaccacccataaaattaaccaagtaaaaaaagagaaaacccaaataaaattagaaacaaaaaggagacataacaattcataccacagataccaaaacatcagagacttctgtaaacaactatacactaacaaactggaaaatctagaagaaatagataaatttctgaatacatacaacctaccaaggttgaataagaaagaaacagaaaaccggaacaaccaataacaagtaacaacattgaatcggtttcaaaaaaaaaaaaaagtctttcaagcccaggacctgacagcttcacagccaacttctaccgaagttataagaacaagtaccartgctcctcaaactagtccaaaaattggaaaaggggaggctactttgtaactcattctatgaaaccagcattaacctactaccaaaaccagacaaggacatgactaaaaaagaaaactatattccaatataccagatgacatagatgtaaaagcccttgacaaaatacaagtaaactgaatccaacagtacatcaaagacataatacracatgattaagtagaatttatcccaggaatattatgatagctcaacctacatatgcaaattaataaaacaccatgcagcrcataatagaggacaaaaaccatcatcttaataggtgaagaaaaagcatctgataaaattcaacatcacttcatgataaatacactcaacaaacaaggaatagaaggaagatagtttagcataataaaggccatataagacaaacatacagctaacatcatactgaatgggaaaaagctagaagcctttcctgtaagaactggaactagacaaggatgcccattttcactattcctagtcaatacagtactggaagtcttagccmgagtaatctggcaagagaatgaaataaagagcatccaaattagaaaggaagaaataaaattgtccttctttgtggatgacataatcttataattagaaaaaccaaaagaccttaaaaaaacctcttagatctgataaacaagttcagyaaagtttcagatacaaaatcaacatacaaaaatcagtagcatttatatataccaataatgaactagctgcaaaagaaattaacaaagcaatctcactgacaatagctaccaaaaaataaaatacctaggaataaatttaaccaaagatgtgaaagacctctacaaaacctataaaacactaatgaaagaaatcgaagagaccataaataaatggaaagatatcccaggctcatagattgagagaattaatatttttaaattaaccatataactcaaatcaacctatagattcaatgcagtctctatcaaaatagcaatcacatttttcacagaaataagaaaatcctaaaatttgtatgaaaccaaaaaagaacctgaatagccaaagcaatactgagaaaaaagaacaaaactagaggcatcatactacctgactttaaaacatattaaaagtctttattaaccaaaacaacatggtattggtatacaaacagacacatagacaaatcaaactggatagagaacacagaaataaactcctgtattgaaagccaattgatttttgacaaaggtgccaagagcatactttagggaaagacactctcttcaataagttgtgctgggaaaactggatatccatatgcagaagaatgaaactaggcccctacttcccaccatatagaaaattacttaaaaatttaaatgtaatatccaaagctataaaactattagaagaaaacacacgggaaacactataggacattggtctagacaaacattttatggctaagatcccaaaagcacaagcaacagaaatacagaataaacgaatgggacgttattaaactaaacaacttctgcaacagcaaaagaaataatcaacaaagtgaagagacaacctgctgaatggaaaaaatatttgtcaaatattcattcaaaaagagactaatattcagattataaaagaaatcagacaacagcataaaaacgttccattaaaaattggacaaataatctaaacagacatttctcaaaagaaggaatacaaatggacaacagatatatgaatcaaatgttcatcatcattaattataagggaaatgcaaaaatcaaaaccacagtgagatattatctcatcccagttacaaaagctattatcaaaaagatcaaaagtaacagatgctagcaaagatgtgtaagtatcagaacycytattcagtgttggtggaaatgtaaattagtacagccattatgaatcactgtatggagatttctcaaaaaactaaaaatagaaccaccatacaatccagcagtttcactggcaggtatttatccaaaggaaaggaaatcactrtgtcaaaaggatacatgcactcttatgtttattataacactattcacaattgccaaaatacggaatcaatctaagtgtccatcagttgatgaatggagaaagaaaatgtggtttayttacatagtagaatattacctgaccattaaaaagcaaaatcattgttacatgaatatactgcaaaaaaatatgtcatttgcagcaacatggatgaaactgaaagtcatcatgttaagtgaaataagccagacacagaaagacaaatattgcatgtactcatatgttacagctaaaaaaatgctgatctcatggatatagagagtagaatgatagttaccagatgctgggaaaggtgtgggttttggggaatgggacggggaataagaaaggtgggtgaaaatccaagaaagtgagaatgagcctggcctaccagcataatcctcagaacagaataaaaactgtctggaaaggataagagagacggctcactttgygttatacacatatagttagatagaagtaataagttctaatgtttgatggtagagtatggtgactataattaacagcaatgaagagtacatttcaaaatacctagaaatcaggacttgaaatattctcaacacatagaaatgataaatgcttgtagtgatagtataacctaaataccctgacttgatcattaaacattctatgcatgtaacaaagtatcacatgttctccacaaatacatgcaaatactatgtaccaagaaaatttttcttgcatataagaaatagaaaagagactaacaacaaattataattatgctagaaaaaaacaaatattgcactggaaaagacattcctcccatattctaatctctatatcattctggcctctctctgctatccaaggaaattcattttaaaattattattttaaaagttcactttaagtatatatgtacctctgcctccaaaacacagactattttctcagtcataccagaaaaaaagttcctggagttagacaaagctggacgtgtctgattgggtagttgttactgaactcagattcacgtttcttccatggagagaatgctacattttgaacattctctttccttttcctattctgtattacactaacactgaattttaactcacgctacaattacacctgacttgcccttttaattggtttcatgccattattatttagtttatttccaattttaaatgttttaaagtataaagtactgtacttattgcggtgaatagactacctgataactccatcatttctatattaaaagagatgatttagattcacccaataggaggtaaaattaaatgtcttcataatttgaaataaaaatattatatattacatttgcagcttcagttcagtttgaggaaattattaataacatgttatagttcagaacaggaaaaccataaaattaatatgataaggaaacaatatttactatttcaccagtaaatatgattttactgtatatttttatatatactctttattagattaaaaaagttttattttattaccattttggtgatattttaaaaatcatgaatacatgcttatatttaacaaatgcttcttccacatctattgatagtattaatgtggtaaattacattaattaattttcaatgttaaacccttatattcctggaataaatcctacttggtaatgatgacttatcctattttatatgttgttaagttttgtatgttaatattttgtttagaattttgtatcccagctccaagtatacagaatcrtaattttcttttaatatccatgtcaagttttggtaccaagctattctgtccgataaaggaatagaagagtagattttttcagttagtgattgcatagtctatgttttcccatatatttacttcccacttatttgtatccttatatttaaagtatatatgtgsgagacatcaacaagattatagaataggaggtctcatgtttcactatactctcccacaacacacagagagaaaatgtagcagctattcaaagaaaagaacaccttggtgaaaacccccagaactggaaataagcctgagacacctgcatgattcatagaacaaaataaaaactgtatggaaaaggtaatagaaatgtctcactctgactgtgttacctttccccttcccccaagtcagcacagtgccacactgaaaagattctccatgaacyacattttctgcagaggaaaaagagaatcagaggtgaacacccagcttttctagcactctgagacttctcccaagaagcccactccagtctcatttcacaagaaactcagaaaaaagtggcatggctagactgcctgtgttctcttttctctattttaaaagggtttgtctatgatggctattatgtcaattattatttttttaatattkaaaattatgtaaaagaattcagcagtgaagctatctaggtcagcagtttttcttttcaagaaagttgcttaaatttggattcaatttatttaacagatgtagcatcattcatattttctactaattcttatggcaatcttggaaatgtatatttctccactttatctaaattatcaagcaaatacttagggaattcagcaccaccaggcttgccttgcaagagctcctgaaaaaactactaaatatggaaagaaaaaaatgttacctgccactacaaaaactcaccaaaggctgggcacagtggcttatgcctgtaatcccagcactttgggaggctgaggcgggcagatcacctgaggtaggagttcaagatcagcctggccaacatggcaaaaccttgtctctaccacaaatacaaaaattagctgggtgtggttgcagacacctgtactcccagtcactccggaggctgaggcaggagaatcacttgaactcaggaggtggtttgcagtgagccgagatcatgccactgcactccagcctgggcaacaagagcaaaattccatctcaaaaaaaaaaaaatactcactgaagtacacagaccagtgacactgaagcaatcacataagcaagtctgcaaaacaaacagctagcatcatgatggcaggatcaaattcacacataaccatactaagcttaaataagcatgagctaaatgccccaattaaaagacagagaatgtcaagctggctaaagagctaagacccattgctatgctgtcatcaagagacctatttcatgggtaaagacacaaataagcttgaaataaagaggtggaggaaaaattactaagcaaatgggaaaaaaaagcaggggttgcaatcttagtttctgacaaaacagactttaaacaacaaagataaacaaaagacaaagaagggcatgacataatggtaaaggtttcagttcaacaagaagagctaactctcctaaatatacatgcacccatacaggagcaccaagattcataaaggaaattcttagagacctacaaagagactcagactcccacacaataatagtaggagactttaacaccccactggcaatactagacagatcaccgagacagaaaattaacaaagatattcaggacctgatcacagctctggatcaagtggacctgatagatatctacagaactctccaacccaaaacaacagaatatacattcttctcattgccccacagcacttactctaaaatcgatcacataattggaagcaaaacactcctcagcaaatgcaaaataactgaaataataacaaacagcctctcagaccacagcacaatcacattgtaaactcaaaattaagaaatttactcaaaaccgcacaactatatggaaattgaacaacctgcttctgaatgattcctgggtaaataatgaaattaaagcagaaatcaagaagttcttgtaaactaatgagaacaaagagaccgtgtaccagaatatttgggatgcagctaaagcagtgtaaacagggaaatttataggactaaatgcccacatcaaaaagctagaaagaactcaagttagcaaactaacatcacaactaaaagaacaacagagccaagaggaaacaagccccaaagctagtagaggacaagacataactaaaatcagagctgaactgaaggagayagagacatgaaaacccttaaaaaagaatccacaaactcaggagctggttttttgagaaagaaataataagatggaccactaggtagactaataaagaataaaagagagaatgtttaaacaaacacaataagaaatgataagggagatatcaccagtgatcccacagaaatacaaccatcagagaatactataaacactcctatgcaaatgagctagaaaatctagaagaaatagataaatccctggacacatgtaccctcctaagactgaaccagaaagaacttaaatccctgaacagaccaataacgagttctgaaattgaggcagtaataaacagcctaccaatcgaaaaaagcccagggccaaacagattcacagctgaattctactagagatacaaagaagatctggtacaatttctaatgaaactattgcaaacaattaaaaggagtaactcttccttaactcatttgatgaggctagcatcattctgataccaaaacctggcagatacgcaacaaaaaagaaaacttcagaccaatatctttgatgaacatcaatgcaaaaatcctcaataaaatattggcaaaccaaatccagcagcacatcaaagagtttatccactaaaatcaagttggcttcatccccaggatgcaaggttggctcaacatatgcaaatcaataaatatgattcatcacatagaactcaagacaaaaccacatgattatctcaatagatgcggtaaaggcctttgataaaattcaacatcccttcatgttaaaaaaactctcaataaactagatactgaaggaatatacctcaaaataataagaaccatatatgacaaacccacaaccaacatcgtactgaatgggcaaaagctgaaagcattccccttgaaaactagcacaaggatgccctctctcaccactcccattcaacataatattggatgttctggccaggacaatcaggcaagagaaagaaatgaagcgtattcaaataggaaaagaggaagtcaaattatctttgtttgcagatgacataatcctatatctacaaaatcccattgtcccacccaaaagcttcttaagttgataagcaaatttagcaatgtctctggatacaaaattgatgtgcaaaaattgctagctttcctatacaccaacaacaggcaagccgagaaccaaatcatgaatgaactcctattcacaactgccaccaaaagaataaaatacctaggaatacagctaacaatggaagtaaataacttcttcacagaaaactacacaacattgctcaaagaaatcagaagtacacaaacaaatgaaaaagtattctacgctcatggacaggaagaatcaatatcatgaaaacggcaatactgtccaaagtaatttataaattcaattcaattcccattaaactaccactgacattcttcacagaattagataaaaactattttaaaattcatatgaaacaaaaaaagagcccgcatagctgagataatccaaagcaaaaagaacaaagctggaggcatcaagccacctgaattcaaactatatactacaagcctacagtaaccaaaacagcatggtactggtacaagaacagacacatagaccaatggaacaaaagagaggactcagaaataagaccacatgcccagaaccatcttttctttgacaaacctgacaaaaacaagcaatgggggagagactgcctccttaataaatggtgctgcaagagctggctagccatatgcagaaaactgaaactggaccactttcttacaccatgtgcaaaaattaaccaagatggattaaagacttaaatgtaaaacccaaaactataaaaagcctagaagaaaatctaggcaatactaatcaggacataggcacaggcaaagatttcattatgaaaatcccaaaagcaattgcaacaaaagcaaaaattgacaaatgagatctaattaaactaaagagcttcttcacagcaaaagaaactatcagaatgaacagacaacccacagaatgggagaaaaattttgcaatctatccatctgacaaaggtctaatacctagagtcaacaaagaacttaaacaaatttatgagaaaaaaaacccattaaaaaggaggcaaagagcattaacagacacttctcaaaagaagacgtacacgtggttaacaaacatatgacaaaaaagtttaacattatggatcaytagagaaatgcaaatcaaaaccacaatgagataccatctcatgccagtcagaatggctattattaagaagtcaaagaacaacagatgctggtgaggttatgaagaaaaaggaacacttttacactgctggtgagagtataaattaattcaaccattgtggaagacagtgtggcaatttctcaaagacccagaggcagatataccattcaacccagcaatcccattactgggtatatgccccaaggaatataaatcataaatatatatgtatccttttctattatatacatgcactcatatgttcattgcagcactattcacaatagcaaagacatggaatcaatgtaaatgctcatcagtgatagactgggtaaagtaaacatggtacatatacatcatgaaataatatgcagccataaacatgaacaagatcatgttctttgcagggatatggatggaattggaagccatgatcctcagcaaactaatgcaggaacaaaaaaccaaacacctcatgttctcactaataagtgggacctgaatgatgagatagtgggaccatggacagatggtgcgaagcaacacactctgggacctgtcagtcaggggttgtggggagctgagagggagcatcaggaagaatagctaatggatgctgggcttgatacctaggtgttgggataatctgtgcagcaaaccaccatggaacacatttacctatgtaaccaacctgcacatcctacaaatgtacccctgaacttaaaagttaaagaataaaaaaacttaaaaatatcttttggttcatatctgtgaaaatttatattatttctaaagtgaatacccttagaaagaaacaccgttaagaaaatgaaactgcagccgggcactgtggctcacgcctgtaatcccagcactttgggaggctgaggcaggcggatcacaaggtcaggagacagagaccatcctggctaacacgrtgaaaccccgtctccactaaaaatacaaaaaaattagccgggtatgatggtggacacctgtagtcccagctacttgggaggctgaggcaggagaatggtgtgaactcgggagkcagagcttgcagtgagctgaaatcatgccactgcactccagcctgggcgacagagcgagaccccgcctcaaaaagaaaaaaaaaagaaaagaaaagaaaactgcttattattaagaaaaatggatgagaatttattttcaagctgaataaataataatgcttaaggatattaatatactaaattaccatttgtatattattgttttgattgctttatataatcatttataattatgactatataaatatgtttatataaatatacttatataatatacttatataattatataaattatgttatattatataaatataattatgtaagtatatttatataatataaatataaatttatatttgtattatatacatataaatatgtatataaayttatatttctatttatcaatataattatatttatgtaatataattatataaatatatttacataaatagaattatataaatttaatatataatataattatataaatatataaattatatttatataaatataaatgtcccaatttcaataatggacagggcatccaaacagaaaattaattattaaatattgagcataaacactttagaccaaagggatctaacagatatacacagattactctgtccaacagcaaatgaatgcacattcttctcaagtgcacagggagcattctccaggatagatcttatgttaggccacaagccgagccttaacaaatttaagaagatttaaattatatcaagtaccttttttttttgacagtaatggtatgaaactagaaattaataataagtaaaacgtcaaaaaattcacaaacacatggagattttaaaacgtactcctgaacacccatgcgtcaatgaagaaattaaaagagaaatttaaaaatatcttgagacaaatgaaaatgaaaatatacccaaagttatgggatgcagcaaaataagttctaagaggaaaatttacagcaataaatgcctacatcaaaagaggaaaaagtatcacaaatgagcaacttaatattacacctcaggaaaatagaaaaaggataagcctgatgacagcaaaaaaaaaaaaaaaaaaagaaacaataaaaaccagaaaataaataaaatagagactaggaaaataatawaaaagatcaatgcaactawattattttgaaaagataaacaaaattaataaayctttagctcgactaagaaaaaatcggcaattaaaaaggagacattacaactgatactacagaaatacctaggatcataagcgactattatgagcaactagatgccaaaatattggataacctagaagaaatgaatgaattattagataaacacaaactaccaagactaaaatcttggtagattttgaagaaatcatgaagacacagaaaggttgaaccaaccaattaagagtaaggagatttcatcagtaagaaaaagtcttgctgaaagcaaagcccagaacctgagggcttcactgctgaattcgcccaaacatttaaagaacaatgccaatacttaacaaactcttccaaaaaaattaaagagggaattcttcctaaaacattctataaggccagcactactctgataatagagtgaaataaggacatcagaagaaaacaaaactgcagggcactatccttggtgaacatatatgcaaatgtactcaaaaaaatactagcaaactgattttatcaatacattaaaggatcattcatcattatcaagtgggatttattcatgtgatacaaggatgattcaatatttgcaaattaataaatgggacgtgctacattaacagaatgaaaaacaaaaactatatgatcrtctcattagatggagaaaaattattagaaaaattcagaattctttaatgataaaaactttcaacaaattaggtatagaaggaatgtacctaaacacaataaggaccatatakaataagtccacaaataaaatcataaataacagtgaaaaattgaacccttttccctaagatccagaaaaagacaaggatgtccactctcagcatttctattcagcatagcattagaagtttttgccaaagcaattacgcaatagaaagaaataaaaggcatccaaataaaaaaggaagaaatgaaattgttgctgtttgctgatgacataatcttatatctagaaaactctaaagaagccaccaaaaaaactgttagaataaatgatacagtaaccttatgggatataaaatcaacacaaaaaaattagtagtatttctatacactaacaataaaattcttgaaaaacaaatcaagagaacagtctcatttacaataactattaaaaactttctgtggaaggaagtgaaagacttgtacactgaaaactataaaatgttaatgaaaaaattgaagaaaataaacaaatggaaagatacctcrtgttcatggtatggaaaaattaatattgttaaaatatccatcctaggcacagtgatcaacaaattcaatgcaatttccatcaaaatttcaacgtcatttttcctataaatagaaaaaatacaawcctaaaattcatatgaragcacaaaaatcttgaaaaactaaggcaatcataagcaaaaagaagaaagctggaaacatcacactatttgatttcaaattatatatgaagtgaaagtaatttaaatagcatggtactggaataaaaataggctcattaacaaatggaaaaggatagagaatgcagaaatgaacccactcatctctgatcaattgattttcaataaaggtgccaagaatttttaacaaatgtgccttttatgttgtgaaaaggagtcccttaaataaatagtgttgagtaaacaatatggatatgcaaaagaatgaaattggacctttatctcacatcatatacwtaaatcaagtcaatgtggatgaaagatttaaccataagtactgaaagtttaaaactactagaagaaaacatatgagaaaaactatgtgacattggtctgggcaatgatattttcgatttgatctcaaaagcacaggcaacaaaagcaaaaacagaaaaatgggattgtggctgggtgcggtggctgacgcctgtaatcccagcactttgggaggccraggtgcatggatcacctgaggtcaggagatcaagaccagcctggccaacatggtgaaaccccatctctactaaaaaaaaaaataccaaaaaactagatagktgtggttgtgcacgcctctggtccagctactcgggagactgaggcaggagaattgcttgaacccaggcagcagagactgtggtgagccaagatcatgccactgcactccagcctgggyaacagagcaagactccatctcaaaaaaaaaaaaaaaaaaaaagaagaagagaaaaatgggattgcatcaaactaaaaagcttctgtacaagaaatgaaacatcacaatgaagagacaacccatagattaggataaaatgttttcaagccatacatccaataaagggctaatatccacaatatatattaggaattcaagcaactttatagaaagaaaacaatatctgattttagaatgggcaatggacctgaacagatagttctcaaagataattaagaaatggccaatagacatatgacaaaatattcaacatcacttatcattagggaaatgcaaactaaaaccacaatgagatatcacctcacacctggcagaatagctattttcaaaaagacaaaagagaaaacgtgttcgctaagatatgaagaaaagggaaccattgtacactgttggtgggactgtaacttagtaccaccattatgaaaaaaggtaaggaggttcctcaaaaaactaaaaacaatattatcatatgatccagctattccacttctggctacttacccaaaagatttgaagtcagtatgtcaaagagatatctgtactcttctatttattgccaacactattcacaatagccaagttatggaaccaaacagagtccatcaacagatgagtggataaagaaaatgtacatattcccaattaaataccattcagtctttaaaaagaaggaaatcttgtcatttgtgacaatatggatggaattgggaaacatcctaagtgaaataagtcagtcacggaaaaacaaatactttatgttcttacttatatgagggttctaaaataaactcacagaagcagcgagtagaatggtggttaccaaagcctaggggtatgatggggaatggagagatgatggttaaagggtataatgcctcaattagaggaataatgggttttttcttttgctataaattatacagtgtaatcaatatagtaaataataatgtagtacacactttaaaatcactgagagtgaatttyaaatgttctcaccacaaaaagataagtatttgaagttatagatatgttaagtagcttggttaaattattccacattatatgcataaattataacatccctttgacatatacaattataatttgtcaatttacaattaaaaatgaaaattttataatagaaataaaagtgtgtatttgcaaacagcatacagttggatcttttaaaaaatataatctgataatatttctcattaactaaggtattaatccatctacctttggtgtagttttcatgcagttacttttaactgtattatcttactatttgtttttacttatcctagcaatacatcattcctgtatatgcccttttcttccttctgtgggaatcaagcattgtttttctattttatatcctctaattagatttttagatatacattttaaaattaactttagtagttattgtcagaagtacaataggcatatggatctatcccaagcagggctacattaataatctaacacttcctgcaaaatgcaagactacaatacygtttgtctacttcttgctctttttgctagtaatgtcatgtattttactcccatgttttgcatatgttacaaggtaattttattgtattaatcaatgctatttgtacttacctacataattgccttccaaatgctccttattccttcttgtaccccggtgcctcaatctgataaaaattgctcttctgagaaacttcctgtgcaattcttataaattctttcaacttttgttgtctaaaaaaatatttcttttaccttcatgcctaaagtatattttcataggttatakaagtctaggccagtagttttttttatcatttaaaaaatattattttatcattttctggcttccatagttactgttgaaaattcagcctcattcagtcttactgtcttaaagataatgcatctttttttttttttttttaaactcaggcaacttctacgaattttttcttgaatctgcaggttgagatcttttatcattttttggaacattctcagccatttaccttcaatcattgctttttttccttctctccttttaaggatctaaatagataattagacagagagaagatattagatatatattttatatatttatggtatttcaattaaccatctttgagtccactaattttttgtgtccagtctactggtaagccaatccaatgcattcttaatttcggattttctatttctcagttccagaatgtacattaactattcatttttctacctttttattctctttaacgttaatcattattactttatagtgcttctagtaactgtaacagatggatcactgtggatctgcctttattgtctctttcaatctcccttacattttcattgtatgcyagacaatgtgtatatacgtacattggaaacctcacagcrtatccccccagagcaggctaagggtctaatcactagaatccagtaaacaatttagctgtgttggggctgggtagcacttttaattagcctcactccatcttttatttatctgtgctcctcaggtgttactctcatgggtttctgattcagagtttatcagatctatttcctcttccttgaaatatttcacaacattcagttcttccattcagatatattggcttactctttagctttacacaaatcacttgggagaccagctgtatgtttgattcactccctctctctcccataggacattgcctcctcagatcctgaaacyagtggagattttactcttttggtgtagcctcctgttagttatgaccctactgacttctactccccccagtgaagtttcttcacctatctcatgttcaatctttagctggtcctcaatcaacaaatgcttgcagagacaaaaagtcagtaatatacaattcacctggcagggcactttcctctctgtaactggttcctctagttctcgttgctcctacaactctcccttacatttaaaaatatgagtcttatcatattttttgaattactagggagcattgttctgctactacctagtgtttctacctgaaagcagaagtatacaaactacattctgatttgaaacaaaaataacactgcttagagatgcttctcttttagtaaaaagccaaaaatgtattaaattattacaaatcattttcttgcattagatagcawgacagaagaaccaggctcagcattctatcttcttctcccactcatccataggctcccgtcaattaatctgtccctacttaacactaagtttgaattttgaaaagaaatgaaagtatagattgcatgttttaagaatttgcaaattacactcttgtgtatgcaccttcctgcccccattctgtctctctcttcccactctgcgacatataaacacacacatacaaacagacagaagtagaatatttgttttaatctcccctacaaagtttagggacagaagatacaatgaaagaccaagagtataactttctcccttgtttctgtctactctattttagtaaaggaatggagagaaaaacctcagrattaggtgaacacatagctaaatttaggtcatccttccttccctagactcaatttcaattaaaagtgaaaatatcagaaggggaatgtttttatatagttgttatggttcattttatgtgtcaactatcaggcccagttgtttgatcaaacacccagagtaatcaaatctaataatcctagatttggtaatctcagtaccaaatattttggtactgagagcagggtgctgctgtaacaaatacctgaaaatgtgaaagtgrctttggaattgggtgatgggtgaaggctggaagaattytgaggtgcttggtagagaaagcctgcattgccttaaagagagtgttggaagaaacataaatattaaagatgcttcaggtaaagtctcaaacagaaatgaaaaacatgttactggagactagaggaaatgtgattcttgttattaagtggcagagaacctggctgaattatattttgttgggtagaaaatagaacttatagtgatgaacctgtattcattattcagctgaagagatttctaagcaaagtgctgaaggtacacccttgtttcttcttgttaccaatagtaaaatacaagaggaaagggatacatttaagaagaaatagttaagcaaaaagaatccaaaacttgtggatttggaaaattctcagcctatccacattacaaaaaaaaaaaaaaaatagaaaatgtgctttggcggtatcaccaatgttattgctggaaaactgtttgctcaggagattaggcatgtgatttgtggatccaattagtcatctcagcataaacactgccatcctggactgaagggtaaaggcatgggttaaaaagaargaacactgtcagacttctgggattccacaggaagaaaataaaccaatcgaactatttggatgcaaatatgtattatatttcagaaracgggaagaatgaccccccagggtgggtcagaggccagcaggctaatgctgtcaccatggactcggagggtacaggcccagkgcatagcaccctcacctcctggatttcagaggccataggcagtgctgtcacctggggtcaagacaggtggagccaccaccaggtcatagcatcaagcctgtgggaatatttctcaagccttaacatgtaataaaatttgccctgctaagttttaaacttgcttgagacccatgacccttttttctttcaatttctctattttgaaatgggaatgtctattctatgctggtcccactattgtattttagaaacatagaacttgtctggtttcacaatttcaatgatgaaaaaaagtttttcctcaggataaataatattgcgtctcacccataattgatttgaatgatttagataatgagatttgagactttgatttgatagtgtttagatgagatttgggacttaaaaattgatgctggaatgatgaagacttttagcaatgttgggatggggtgaatgtattaatattttgcacatgggaaagacatacatttggggagttgaactgttttgtgttgaatcatctgtttcccagtaagagatataccctagtacctcagaatgtaaccttatttggaaatttggttaaatgtggtctttaactttaaagttaaaacaagacagatacacacagaggaaagacaatgtgaagacagccatataatgacagaggcagggattagattgatgcagctgcaagccaaggaatgatatcctcatctcaaaactatgtccccctcccagaccctgaatgaatcctaacttgatttcggtagacccagacaaatagtttgatatcatgtcactctcacccataggctcaacaaggacagagcatcccaggggtgaccattcctctgatctctgcctcacaactcacctcagggtaaccagtcttctgcccaagctaaagcacccaacacacccccatcggtaagaatacacttctactctgcttttccaaagagaaaagtacagtcatatggtttatgtctaagtagtctatttagcccaattgctgtttggaattatatagatatagatatagacatagatatagatatagatatatattacaagatatatacatatatcttgtaatgttcacagtatgcctagtatacaagttactagtatacaagtcattattctcattccctggaggagatayccgaagcacatgaagcttaaataatctgccttagacattcagttagtaaacaatggagccaaaattaaaaccaaggactgcctgcaaaagtgtcaaagtacaaagaaaatgaataatgtttgttttagatcatctcttagggatgttcagtctttttcagtttttcagattaccttaccctctctttcatcttaccaaggtattatctgaatctgtaaggtcatttgctggatcctttgttggcatgggaagaaaaagtctcctatttgtaccacgtgattttgtgccactcttctagcccttaatgaaaaacatttctttgtttgcccaggtactagtgaccctgctggctatcaactggctaaggatggcagggcattgttggtacctgcccaagagccctagctcatgacctgttctcctccaccttggtcagggcctagtggtattgtctactggcctggacccacctcrgctctcagtggtgctttaaatccccttagggttggcagtgaatcctaagtagtctgtccaaaagtcctttaatacagagtctcttcatccctgcaatcactatgttttctggcaagctccccaccctaactcccagctaacattctatctctctacttcaagagaagcctgggatttggcatttctatctccactgtatgaaaaacgaaggtggcttacaggagctacaccaagrctccctctatgcatgcaccatccctctaacactaatacagtctcccacaggtagrtataggactctttacaataaaatactaggctaggatatcaaatatagattggtacaagagatgtgctgctttatattcccatccatatgtctttgtctctcctctaggacttcagtcaatccgaagtggttcacttctcatctctgcctctttcttcccaaatgtcctgcactagaatggtatgctccccactcctttcaacatgaaccccatcatgttataaccttcttctacctgtgcaaatgattaccatgtctcctcctattaatgatggaagggctatcttttctgtgttatggaagaaactaatctacatggtcagtcctggcttttaatgttaatagacaattatcagctgaaatagtttcagctataattaacagaaaataactcaatttggcttaaatagtacagaaacagcattatctgatatggttattcccaagataaggccattttaggtttttatatttagtgctcagctgtgtcataaaacacagttttcttacttctttctgccttgccatccttagccaggttacagccagattctaggtgtcacaggcagacacaataatatctagcaaaagaaaataacagctttttcctcttcaggtttgggaaggattgttggtaaacttctctaatgaagtataatatatttcattagaaattcaccaacatataagagttactgttgtcccacattcttgtcaacacttgtcactttttttttgttagccattctagtgagtaccttgatattggtggagttgtttttgcatttctaaataataattatttaatgttaattagtttaatatagtgcttcctctgtaataattttatgtcacatgctttttaaaactaatgctcactatctaatgatgtaaccatttactcaattcatgcactcaattagttgccaaaacaatattccagtaactttttatagcaaggaaagccttgatcagaagcatttacagcttctcacttctcagatgtgcatcacgtgcctatacataaactggtttttggcaaaggcaacgagacgaccataattggcttagaccactcatgattcagccccaggctgatacaggagtatatctcccttaaggtgcactaccagtggggtaaccgaattgaatcagagttttgttagaaaaaagaaggaaaagttactgttactgagtagacaaacaaaagtgtacactaaaatgctgatggaattttaaaaaataatttcatctcttgataaagtctagctttcataattattttatctattcagaaccttactttgttaatcaaaagctaaataactgctatattagacaaatggatgaatcagaataactagtcagaaaatcatatacatggagatgcaaatgagaaatgtatttcaaaagcaacttcctcactgacttaaaatcagtctgtcatcaaaacattatgggctatagtctgaatttcaaataaggtaacatttgttagataatgttaacttcatttgtttcagttggctaatgaccaacatgtatttggaagtcagaaagcctgtgtttagccatacaatgcatcatttggctactagcagtgatatttggcttgcaatgagacactattttttcttctgtgtgacacttcggtgcttagccagctgcttaagttaattataaattttgctatctattgtcagaaatcacctgttccagactttggctataacacatgtttacatatccatatatacatttcttcttataattactttaggttcaaagaaagataaaatccctcaagtctgaggttgaatcttcctcatttccctaataaacaaaattgcttaaatcttaacaagatgtggctttctttggataaaatttgttattaaaaaaaacaattagcttaaaagaatctttctctgatatattattatatcaaccaaataaacatcttcatgtgtagaaaaatatgagatgaaaatatttaaggaacgtattaggtttattttgttacctctattgtttgctaaaaagattctaatttgaccttgctatgatcatatagtctacaaaaacatattcttaagatttaagactgtaaccgtaattttcattaaatcttcaaagtaaatttaatgggattttataaattagataatagttgtaattactcatacttactaattaaattggctttacttaaacatgaagattagttggttttaaacaaacatattcccaagcttaattttggataagggcagttacataaattcttttctaggtacaaaaaagtaaaaccacacatgctaatgaggtcaaggaccagcccctcccaaattttcatttccacacatgtcagcaaacagctgggagctaacaacagtaggggttgtacttttgacccctttaaatataaaatggctctgctttgaaaagacaaagaaaataatgcactgcaggtttcaactctatgtgtctgtctcagcctcacccaagctgccaggtatagtgtcttcctcttgggagttcagccatagccaagctcttaccagggacagtcaggctggtggttccttctgagtttctcagtgtttgtggttttcagtggtcagtgagctacagctttcctaatctactcccatcagacatgcagtacccccaggcttaatacagcttagccttctaccctggacacctgtggtcctatctaactcctaattcctgtagaaactttgtcttcaggaatgagtcatgcttccagattcttcatcttatttcaatcaagcctcagtccttatactctagttaccaaacatcaacaagaatcatggccatcctaaagcctcccttagcccaaatcctgtccacctgaatcaaaaacctctgaaactttcatctcacttagagacatcctgattttgacactctaccagttttcctcagcctccaccaattaattacgaattctgtcccattctcaggtcaatctttttgccctagaaggaaattttattatgctattgacctaggcagggctgccagtgacaaataggtatggtgcatatcagaacctttgtgtttagttgatagctgcctgattcctttcctgatacaaaggaagcaagtgactgcatctgaagcaaaaatatttttttctcctttatcggcataactagttttttttttttaaactatagttccaactttgttgctagagaaaaaacagctggtaggaggagtgtaacaagaaaagaggcttaaagaaagctgtgatttctacagttattctaataaatgtgtgaaatagccaatctggaagcacaggaaaaaaccaactgaaagtatatgaattgacatttgggcatatgaggtctcctcttcaacaatatggtaagaagtttgtctgttgtaaagcacatgtggcaattaataagagtacgttaagtttattaatcaggcactttacatgtactagttaattctttaaaaatcatgggagataggtatattttatagatgaagaaactgaatcacagagttgaagacatttatccaagggcatacaatcaattaaatggcagagtaaacaacagtattattaacatatgtgtacttgaagtttgctgagagatcttaaatgttctcaccacacacacacccctccacacacggtaactaagtggagagatgcgttaattagcttgatagtggcaataatttcataatgtatatatagcaaattataattttgtgtaccacaaatatataacttttttgtcaattatgactcaataaatctagagggaaaagaaaataaaaaatataaaaacaaatgaaacagtaagaattccaacccaggtctgctgattcaggtgacggtaagtcaatattagtcaacgttaagcattgtgtagaaaattatcctatttcacattaaaatatttccaaaggaatttagaaatagtctctgttctatactctgacaagaatgcaaattctgaaaatgtcctgtccttcattaaatgatcaattaaggtagcatttgagggaaacatatcatcttgccttcctctactatccttcaatatttaagtaccatcagcagtgctcattggatctccaaagagagaaatgctaggaacctaaaaatccctctgtcctttactagctacttaacatggctaaatcttgaggagtcatagcatggtggacattttgagagaagaaacactgtttataccagttaggacttggtttctcgccctgagaacttagctgtaccacttacggtcttaggaatcctttctcccaacaagaagcagacaaaatagcctctttgttcctttcctggacaccatcctaaccttgctctttgaaatctttcttctaaaaaagtaaggaagaggatgcaaaaattagcccatagaagcagcctttttctaaggcttgagtagtacacttcacctttccttccccttgctctgtaacctaatctcaagaaggttgttcagataagagtcccaagaacattcaactccagactatccgattgcaccagattgtttctggaagacacagaagaatgatctgtgaagcaatcaccaaaggaagataatacaatgaggaaagccatctaaaggagcctgccacaaaattttaaaaactctgcatggcaacttgacccagttgtgtcattgacagaattatttcttctcaggaggaaagactaggttatgctgtagtaacctaaaatctcaacggcttacaaaagggaaagtttacttttggttgctactacacgttcaacacaaatcagacagcctggtgaagaggggaaaagaaaaatatgcctaacctcaaactggctctcaaagtttctgcctctgtccagattcaatgggccaaagaaaatcagatggtcactcccaagtttaaaaggcaaaaatgtatgacccttctgttgggatggataccacatattatgtgatgccaatggaagtatcatttgctccaagagaaggacagtgactattatgaacaaaactacaacatgccacagactgtgtttcttgtctagtggtttatttgtggtgtaccacaaatttagcagcttaaaacaacacacatttattctctcatagtttcttcgggtcaggagcctaggcacagcttatctgggttctctgcttcagagtctcacaaggctgcaatcaaggtctcagtcagagctgatactgagcctggggtttctatccaaactcacatggttgttggtagaattcagttccttgcagctataggactgaggccctcatcttctgcaggtcaccttcagtgctttgccatatgggcctccccactgtagcatggtgagtcacccacctggttacgcaaggttatatgtccactgcctgaaccctgaaggccaggcaatgtgccaaggccacagtgcccagcccaagagcaggtgtccttgagaacccaaacatcccagagagtatctgagaacctaccaaggaaaacagtcccatcacacacacacacacacacacacacacacacacacacacacacacacacatgcagtaggcaaagagccagaaaattagcttaaaagcagcttaagaatgggaagcagcatggatctctaaagttgtcttgctgccatccaggagtgcctcacatgtaagtcctaataaactcctctacttgccaatctggatttgtctgagtcattctttggtctctcagctccctcctagtttgggaggaatgttttttaatacaattcctggtttttctcattatacccatacaggcagcccacaatatggcagcttgcttcttcaaaaccaggaaagtagtccatagaatactgccaggatgatagaaccttctataacataacataatcgtggaggtggcatcccatcatctttgctctattgtattgattagaagcaagtcaacaatttcacccacagttaggggaggtattgtacaaaggtatgaacaccaggagacacagacctcaaaagccatattaaaatctgtctgccacaggtggtggggtaggaaatgagtggggaatctttgggaatctttaggcttcccctagagattagagtatgccactcgtgtaaattccaaaaacatggccaagaatgttccagttattaccagagacatgatattatagcttcctgtgtcggtaaaatta

SEQ ID NO: 97456 - DNA, 17377 bp, Homo sapiens
tccggctgggtaactttttagtttctaagcttccttggtatgtggggaagagaaaattaggaagagaatcagatgcagctgaaaagccctaacgacctgagatgagaggtctcagtttcagagcctgttcctcacagctgtctggcaaaaagagaacttttccgaactgaaaagcaacaccaagtattgactgccaacccactcggtcatccaggttaactgtgtatacagacctgtgcaggttatgtcaccaacggttactctgaaggtgaaagtgggcacgtgtatttgcacatcagatctttcacattcataaactgggatgttcttggtcttcatgccgtattcgtgtaatacctgaatcggtgttttccctggcttagctgttatcatcttccccaaactgcaaaaaccacaaaaaggtgtgctttgcatgccaaattggagattgaagcagaagcgtagaggccagttttaaccgccaccgacggtgacgagggaggcgccgagttccccggaggccagggccagagctggcgaggctggggcgcacctgtcttccggccccgctgcggcagtcactccgcaggagcaggcggggtgagcgaggtctttagagagagcacttgaatgcgggtaggagagattctcaacagaacagggctggcagcagcgccgcagcctctcagggaaaacctgacgatcccttcccgggcgcgccgaccgagcgtcacctccgcccgccccgcgcgccgccagggaccacgagaggggcggggcccggccgcagaccccaaccctcgccgccgagagggcggggccgagcacccacagccgcggaggcgtgggcgccgggcacggctttacccagaatgcctctggagggccggctccccgcgccccggccctgccgcccaacgctcccggccctggggccctgactgcccgcacgctgacctgaaggtcccactgtcctcgcgctccagcggcggggcctcggcgcggtgcctgctctgggacatggcgagaagggacggctcagcggctggaggaagagcggtgcggagcgacgtgctcgctccccgggtcgctggtccccgggaggagctccagcgccgccacctcctccgactcccccgcctcctgcttgcgttgctccagcgagggggcaggcagggtgggggcggagccttggtgccgtagctccggctacgccccctcgctgctcctctgcgggcctccgtcccggcccaactccgcccctgtcccttccagggtccgcccccttcccgcccggctccgccccgctcccgcgtgggcacaggcattgggctcccgggggttctccgcgcccgcccctgccggccctgaccagcctgtagtaactggcccctaggccgcagttctttgtccttagcaggaggccgtttcttgccgggagagagggattagagggattgtccggcgtgggtctagggtcgttgaggcctaaagttaagcctttgtggggaggacggattgggggctgggtcactttaagaaaaagattctaaaattacgaaggcagaattccagggagtctcccgggcctggtcctgaagcttgagaccccggatatatacgctccagggggctgcggtgcgctcttcgggtccccgagccctgtgtttaggaacacgcggggacgtccaaacacccgctcctctcccgccgggcgggctcctttgtcttctgggctttcgtcgcgagatggaacgctgggtcagtgcatcccagcaaaacacgttaggagtaaacgaaggcctttccggggacctgggtagtcggttgtaatggcgtttgcctgggatgcagcacctttggtgggccattagatgacgtgtcgcttctccaggggcttgctaggcactagcagaaatgctcccctgtgcttactcggtgttatggaagattgcttgcacaatgctattcgtacgaaaggatattattaaaagtgatttatgggcgggcgcggtggctcacgcctgtaatcccagcactttaggaggccgaggctggcggatcgcctgaagtaagcagttcgagaccagcctggccaacatggtgaaaccctgtctctactaaaaatacaaaaattagccgggcgtggtggcatgcgcctgtaatcccagctactcgggaggctaaagcaggagaatcgcttgaacccgggaggcaaatgttgcagtgagccgagatcgcgccactgcactccagcctgggcgacagagtcagactccctctcaaaaaaaaaaaaaaaaaaaaaagcgatttgttgttttgttagcatgtaagccctggatgcttgaaacaagtgaaagatgttcagaatctaatcaaattatatcatctgatgctttaattagagcctattctctcttcctctccgtctatatatgtatgtatatagattactatccatcactgttttaatggatatcttattggaagggctacatagtcagtatttcacaatatatgaactccgcataacacctatggcaaaacatttcagcactcaggtaaaattcattttttgccacaaaattacttaaaaacaggccagaactttatatagctcttgttaaaggttaagtagctgggataataatgaaacaaaaagatgcagcaggactccatttcaaagagagagagtctgtgtgcccaacttcagagtaagaaaccactaggtaatagtttatatagttacttatatgtaatgtggctttattttttaaataaagatttgcatataattgtttatatctgtgaatttatatttaatattaaacacagttttgtaagcatataagatggaaaatgaatgaaatgctcaatcaatgagctgtatgccatgaggattcaaaacagcactttggtgttgccaaaattccggtggtggacttgtgaaggaattccctttggactaggtccactgtagattgtatccgggactatcgttagtgcctaaattgcattgcttcccacagcactatatgcttcccttaaaattggcccattgccagtggcaaatcactatctactgtgatccttatcatagacattggtcatatttttacgttattagttttctgtgtatattttagtgctatagcctgccattccaagttaaacatgctcttagcatatcattttacaccgttgatctataattcattacctgagcacatgagcagaggcagggaattatacagtggtaaactacttggtgaaaccatgctttgtatttttaagatgtataattatatttaaaaacaagcaatgcttaattttgtgcctgattttcctctttaaaaatggatttatctgggggttgcagttgatgacgttttgattttaatatgtttgctgctgctaccaagagctttgtcaagcaagttggagatggagggagattagttcctgttccaagcctcagtgaagctgacaaatatcaacctctaagtctggtggtaaaaaagaagcgatgctttctgtttcctagatataaatttacttcaacaccttttacactgaaagatattctcctaggagacagagaaatttcagctggtaagtttaaatgtttgggagtgccaactcattcatctgtattattggcaacctaaacataggtcatatatgctacttatgttagtaatacacattttcaatgattaaagcaacttttattatgatgttagtgtaataacattattaagattaacaatgccaaaagtttgtataatatcaaatctcttattggtcaaataattttcaaatctatcaattattttataaattgttttaaccaaatcaacttagaatatgacatatttcttcatctataaaatgggatattatttgggcttacctatgttacatggtcaaatgagatgaaaataatttgtatttattttttacaattcaattattacaattggtaaactgaaatgtattgaagggtaggttatataataagctgatattttgatgagttactacttataaacgcttattttttcttttaattgcccggtggatcttgatgcttaagaagttctgttggctgaatagaaaatttgagttccttttaagaattctggctatgtgtttctttttgttgtaagattaattgaattactactttaagtcttggtgagtcatgttgcctttctctaacatttgggtatttgagtcttcaattgttaatttaacatgttactatatataatctacataagataaagatgtttaaaaaatactgagtttcttcttataaaggtatttcatcttatcaattactgaattatgaagatgaatcagatgtttcactctatggaaggcgaggtaaccatattgtaaatgacgttgggattaacgttgctggatcagattccattgcagtgaaagcttcatttggtatagtaaccaaacatgaagtggaagtatcaacattactcaaagaaattactacacggtcagtataataatcctaatatatttcagtgttttcattaaatactttaggtatataaacttcattacaaagaatgcttaaaacattgaggttgtattttactagtgtaatttgctagatatgtttgaaatacattggtagtatatccaaactttgaataaggatagatatcaaaaatcacttggctgaagtcagagacctcagggccccagatcaaggagctaactgatgaagaggcagagaggctgcagctagagattgaccagaaataggatgcagagaatcatgaggcccagatcaagaatggcagccttgactccccagggaagcagaagactgaggaagatgaggaggaggaagatgagaaggacaaaggaaaactgaagcccaacctaggcaacagggcagacctgcctgattaccgctggaccaagaccctgtcggagctggacctggcggtccctttctgtgtggacttccagctgaaagggaaggacgtggtggtggcatccaacggcggcacctccaggtggggctcaaggggcagccagcgatcatcgatggggagctctacaacgaagtgaaggcggaggagagctcgtggctcattgaggacggcaaggtggtgactgtgcatctggagaagatcaagaagatggagtggtggagccgcttggtgtccagtgaccctgagatcaataccaagaagattaaccctgagaattccaagctgtcagacctggacagtgagactcacatcatggtggaaaagacaatctatgaccagtaacagaagtccatggggctgccaacctcagacgaacagaagaaacaggagattctgaagaagttcatggatcagcatccggagatggatttttccaaggctaaattcaactagcccctgtttttccctccctgaactcttggggctgagctgcaaccacccaactttctttcccactcttctctgggacttgtgggcctcagggcttggggcaggcatgggactggcccaggcacacaggtcccagggcatcaggagaaaggctggggcttggggtcttgtcctccccagttggcctactgttacacattaaaatgatttgcccagctaaaaaaaaaaaaaaaccacttggcttaaacaaaacttttaattgttccacaaaattactttggctctacacacatttgcttaattattagatttaaataatacagcaatctgtctgcaacaaatagagtccccttcaacagactttcaacagacagagtgaaacattctgcataagcatgttttaagaaaatagagaggagagacaaattattacatttcttttgggtgtattttctgactattaggattgccttgatttactattaggtgaactatgaatgaataacacatgatagcaaaaaatgtatttgattatgtgtaattagatgttatagagtcttgtgaatgtatcttctttattttagaaaaattaactttgaccacagcttgatacgtcagtcaaggagcagcagaaaggcagtattgtgtgtggtcatggagagcatccgaaccacacgacagtgctcactgtctgtgcatgctggaattcgaggggaagcaatgcgggtaaaccacacttgttgggttctcttactaactaaagtgttgccatgggaatttttttaagtattgaatttctagtcaggcttgtgtattttgtgaaatgttctgatgaaagagctgcagttgtataggattttgcacagcaatgtctgttctagaatatgaaaaaaaaaaacaaatcttgggattctaaacatgtgtaatataatgcaaaaacagtaatccttgtgaaattacgtgcatactggagtccctcaagttactatttaagtgttgttttaagaataaaaattgagtgagttgaattgattttatttttaagtgatacagtttttgactgggcacagtggctcacgcctgtaatcctagcattttgggaggccgaggtgggcggatcacttgcagtcaggagttggagatcaagttgggcaacacagagaaaccccatctctactgaaaatacaaaaattagccaggtgtggtggtacacccctgtaatcccaagccactcaggaagctgaggcacaagaatcacttgaacctgggaggtggaggttgcagtgagccgagattgtgccattgcactctaacctgggtggcagagtgagactccgtctcaaaaaaacaaaacaaaacaaaaaccccaaccaaaaaaaaaatgtgtaacataatgcaaaaacagtaatccttgtgaaattacatgcatactggagtccctcatattactatttaagtgctgttttaagaataaaaattgagtgcttaagttgaattgatttaagtgatagagtttttacactttgaattttttaaagctgaatttatagattttttttttgagacggagtctcgctctgtccccgaggctggagtgcagtggcgcgatcttggctcactgcaaactccgcctcccgggttcatgccattcttctgcctcagcctcccgagtagctgggactacaggcacctgccaccacgcccggcagtgttatccaggatggtttcgatctcctgacctcgtgatccgctagcctcggcctcccaaaatgctgggattacaggtgtgagccaccgcgcctggcctgaatttatatttttatattcaaatagtttttcaaagttaatattatcaatggccatacatgctttattcaaggttagttaaatcctttaaaaaatattagcggcaaggtgcagtggatcatgcctgtaatcccagtgcttaggaagactgagataggaagacagcttgggaccaggagttcaagaccaacttgagcaaaataatgagaccttgtctctacaaaaaataaaagaattagctggttgtggtggcacatgcctatagtcccagctactcggaaggctgaggcagggggctgcctgcggggtttgggtcattgtcttttagaatttgggaggctttgaaaagccgtgcttttgtgctggggaagatgtagcagtctcttctccaaaccacccatttgccttcggacttctctggggccagcagccatccaactaggggcccggggccacgggctcagctgacgaccatgggcttcgcgtccaaccagcagtttgcaggttcgagctcaggacttggcggggacaccttaggatgcaggagtggccaggagttcaaggttacagtaggctatgattgtgccactgctctccagcctgggtgacagagagagaccctgtctctgaaaaaaaaattggaaaagtatctgtgtttaattttcagctcaattatgatattgtttatctttgtcattcagtgacacctaataatgacttgattggattaaaaccaattgttagaaagatagggttcaaggataatcttttcaagtctttgcaaataaaagttattttcgcatattcagctgcctgtcaaattctgattaacattggatcatttttgaggcacaaactgaaacatttacttgattgttagcgattgctttagaaagctactaaaagctctggagggctttggaatggtagacaggctaggctgaaaactttaactctggcactgctttctaagatttcctgttaaaaaaaaaaaaaaggcttctgctccagagcattatggttgtggtagcactaatcatgggctgtaataccaaagtaagtgaaaagtgcagaggtatttcctaatatagaccaggagtttctgttggaccaattggatctctgctataaaaaatggtttaattcaagcagaataatyctttacttgggaawtttttgttttgtttttggtaggattataggaaatgtttcatttctccaaaaagctatccttacatgttatgatccttaattatgttatttatttattcaatatagtttcactttatggatgaacagaatcccaagggaagggacaaagctattgttttcccagcacatacaaccatagctttcagtgtttttgaactcttcatatacctggatggtgcctttggtgagttaagggtctgcatgaaatacaaatgattatatttttaaggagcattcattagggcatgtgctctctctctctcttttctctcatttctcgtgtctaacaattatagaagatgctctcagcactgtcaatcttatgctttggcaaaatagctgagaaagaccctccgttcgctgcttccccattccacttttctgcttcttggtgaaggttgtaaactctccactaccccatttaaaattataaataagagctaaaatgccatctactgacaaagtattccttagcttacatggggagataataaatgaccttcttataggtagtttttgatggtggcaaacagaggagtaggtagatagtaggatgcctgaagtgttaggatgcccaaaccagggcctctaaagacagcttttcttacttcagttttacttatcatagacccagcttccccttgcactcttcctaaaaaataactttaaaaagtgaaaatacttcctccaaaattgtcaccttgtataatacctaagtgcagctcactttaggtctctacatttcacaggtctttaaggtctgttggccaactggaacaagtccaggtgtagcccaagggatcaggaaaggcagcccctagccatggtaatttacaaatgtttttagacctgttyttgttcatttctgcaattttgtaggaggagggaatagggagtccagaaacaaaacaaaactacatgttaagtaaattgtctttttaaaaaatatttttaatttttgtggctatatagtagattatatatatatttatgtatgggatacatgaggtattttgatacgggcatacagtgcataataatcacatcatggaaaatggggtatccatcccctcaagcatttatcctttgtgttacaaacaatccaattatactcttttagttatttaaaaatgtacaaattctcagtctaagatggagaaaaaactgtacaattacattattttgactgtagtcaccctattatgcttccaaatactaggtcttattaagtaaattctaattggataactttaggtttttacagttttattgatggttgggaggaatgtaaatggactgatatatccacaagaatttaaaatatatatataatttggacttccacttctaggaatttatcctacagatatatttacacatatatgaaatgatatgagtgcaagtatattcagtcctcaataacaagagattggaaacaacattaaggagactaaataatggtgcatccttgcaagagaatactatgaagccaataagaatataatacttttaatagatatttttcaagagctgagtataatatgtaactatttgggcataaataattttatacacatacatgtatatatgcatctttctttatgcttataaaatatatggagtatttctggaagcaaacataagaaacttaaaccacgggtgcccctaagcccctgaggtagaagactgtggctggatacagggtgggccagagacctatttgtcactgtatctcctttctgtatgaattttgtaccatgtgaatgttaccttttccaaaagtatgtaaaagtcaacttttaaaaacaatacaatgaatgatttgtactagaattcatcaccccatcaaacaataaaatatgaattattcaagttataacatcttctaacaattttttttgtagacctttgtgtcacttcagtgtcaaaaggaggatttgaaagggaagaaacggcaacatttgcactgctgtacaggttgagaaatatcctatttgaaagaagtatgtttattgaagagtactgtgaatgtcttttttttttctttcctggcttaacacatgaggttttctattcagtaatctcatctgttaaggaaaaatttaaatttaaaagcctggctggtatggtggctcatgcctataatcccagcactttgggaggccagggcaggcagattgctagcactcagaagtttgaaacacttgggcaatgtgagaaaaccccatctgtacaaagaatacaaaagaaaaaaaattagttggttgcagtggtgtgcacctgtagtcccagctacttgagaggctgaggtaggaggatcacttgagcgtgggaggcggaggttgtagtaagtggagattgtgccactgccctccagcttgggtgacagagccagaccctgtctcaaaaaaaaaaaaaaaaaaaaaaaagccaaattatttcatgactagtggattcacatatttattaatgctgtttgcattatgtatttttcattttcacttctaacacatttcttttctgtttttgtccttttagatagaagagtgatggatgtcatttctcgttcacagctttacttggatgatcttttttctgactactatgacaaacctctcagcatgactgatatttcactcaaagaagggacccatatccgagttaacttacttaatcacaacattcccaaagggccttgcatactctgtggaatggggaacttcaaaagggagacagtttatgggtgctttcagtgttctgttgatggtcagaagtatgtgagacttcatgcagttccttgttttgatatttggcacaagaggatgaaataaaatgaaaaatgaatacaccgtgttggtgttttaggtgcagttgtgccacaaaccttccctaaattatctaggtttgctttgatgaattaaattaaaatgagaaaagcaaaaagaaattaacctgtctgggtatcatattccctatctataaagtagcaattataacagtagtgtctatttcttaagttgtcatgaaaattaataacattgtttatatcaaaaaagatttacatataaaattcagagattatgaatcatgccagtcactttagaatcatttttgggatgtagtctatcattttagttcaccttttttttttttttttttgagacagagccttgctccgtcacccaggctggagtacagtggcatgatctcagctcactgcaacctctgcctcctgggttcaagcaattctctgcctcagcctcccgagtagctgggattactggcgcctgccaccacgcctggctaattttttgtatttttagtagagacagagttttaccatcttggccaggctgatcttgaactcctgaccttgtgatccactttcctcggcctcccaaagtgctgggattacaggcatgggccaccgtgcctggcctagataactttttatataattaagagatttttgtaaataccaattttattttcaatcaactttcagttcaatatgtaaggatgacaagactgcacaagtagcaacttttggtgtttcaactattgcctttggtctggtaaaatgagaaaaatgtgttaataatttaatgcaatcttaaatgtttaattgcagtatcaaattaaaagcacactgaactcaacatggggttttgtgtacacagttaacaaggtgactgatagtagtaatgggctgccattctatgatgtggatatgctcacgagttttgtcttcataaaacgcaatacggtcattgtgaagttaagacaggtaagacacatctgtttctttgaaaatgtttaaaacatttaacatattcaattctgaaagatctttttaatctactctgctgagaaatctgaatttttcatacacaaacaacctaaattactatttacctttattaaaataattataaaatgaataaaatgttaaaattctagaactcaaggcaaccccctttgggtccctccttgaatgggagctctgttttcactttatttcactgtcttaaatcttgcaactgcactcttctggtccatgtttgttaaggctcgagctgagcttttgctcgccgtccaccactgctgtttgccaccgtcacagacccgctgctgactcccatccctctgaatctggcagggtgtccgctgtgctcctgatccagtgaggcgcccattgccgctcctgatcaggctaaaggcttgccattgttcctgcacggctaagtgcctgggttcgtcctaattgagctgaacactagtcactgggttccacggttcttttctgtgacccatgacttctaatagagctgtaacactcactgcatggcccaagattccattccttggaatccgtgaggccaacaaccccaggtcagagaacacggggcttgccaccatcttggaagtggcctgccgccattttggaagtcgcccaccaccttcttgggagctctgggagcaaggacccccggtaacactttggcgaccacgaagggacctccaaggtgaattgaaactgtaaaactacaaatggttcatcaaatggagccccagatgcagtccatgactaagatccaccgtagacccccggaccggtctcccagcccatgctctggtgttaatgacatcgaaggcacccctcccaaggaaatctcagctgcacaacccctcctatgccccagttcagcaggaagcagttagagcagtcatcggccaacctccccaatagcacttgggttttcctgttgagagtggggactgagaggactagctggatttcctaggccgactaagaatccctaagcctagctgggaaggtaactacatccatctttaaacatggggcttgcaacttagctcacacccaaccaatcagagagctcactaaaatgctaattaggcaaaaacaggaggtaaagaaatagccaatcatctattgcctgagagcacagcgggagggacaaggatcaggatataaatccaggcattccagccagcaatggcaaccccctttgggtcgcctccttgtatgggagctctgttttcactctatttcactctattaaatcttgcacctgcaaaaaaaaaaaaaaaaaaaaattctagaactcaaaatgtagtcacagcactcaatgccacatatatgcatatgaaggcataaggcaatcatgcagatatatgaaatacttgtacactgtattgtatgtagaatgattataaatttatttttaattatgtaaatacaagttttagaatgaatcatcttcctattcatgtggcattatctgtcattttttaaaaacaagtttaaaagcactttgtatgataatgggacaaaaaaattagaattacaaagtttagattatagggtgacttcttaatatggatacaaaaaattgagacaggttccaaaccaaaataaagaatattgagttacttagtttacttcaacggagcaggtttttttgagggaaggcgatgaaagagtaaatgattaagcatgtgaaaaagtattagaaaattgagcatagaaatgaagaaatattgggaggaaggaaaagatagtacagattcttgttttataaggtgtcaaattatgtgctagccatatgtattatttactaatctcatggttgtgttacccctatgtatacttttgtttgtttttgtatgtactcatctgaaagccctctatttttaaatagaatttttgatagtgtaaagaagttaaaggatgaacaatggtttggaaagagcaagtttcagaaggtagaaaaaactttacttgtttggaactcaattattttgaacagagctatttactgtctgaccatactttcctatatatgcagtgtagtagtccattttcacactgctataaagaactgccccagactgggtaatttgtaaaggaaagaggttaaattgactcatggttccccatggctggggaggcctcaggaagcttacaatcatggtggaaggcggggaagcaaggactttcttcacaaggtggcgggtgggagaatgaatgcaagaggaactaccaaacacttataaaaccatcagattgcatgagaacagcacggggaaaaccacccccatgattcagttacctccacctggtctctccattgacatgtggggattatggaaattatggggattataatttcaagatgagatttgggtgtggacacaaagcctgaccataccatgcagtatgcaaaatctatgttccgatagacatgtgccctttctttggtaccaacgtgatcttctacagcatctcttacatactattctcaagtcatatgatatcataacttgaccatgacacaaaattgccatggcactgtatatcctcctttgtttggcacatttatcaaaatttgacagcataccaatttgtaatgatcattcatcattagtgacaagaatgatgggaaatgaggtgacataaggaaagagataactagagaaagggaacgaaaactaagaaatttcatggcatcaatttaaaactatcaagacaaaagcttggggtggcagacatcttataaaggtttacaagagggaagaggagttgcacatttacaataatgtctgaaggaatacaaaagccaggcagtacagtctttatgcttgctataagaggcaaaaagtctttggtttggtcaaatatttttaaacattccccactggaaaatacccaaggctagaagcttacaccaaaaagtttagagactgtgttgcgttctttgtggaacagagatatacaactatcttcctgcacatataccaaaggaagactcttcagttctaggatttttatatcgtcttcataatgttataaaaatgtataaacaagtgaaatgctaattcctgggtccttaatggatattttcaaaatatgaggcactttaacttttaaactataaaaaaactggatattaacatgctggtaaggttaaagttgggaaaagcttgcagtttttgacatactatacatgtcctcctacatcctgaaaggggaaaaaatgcccactgggacccagaggtctgtttcatggtgctacaattcttgtttacagaataaagcagtaggaaacacagtcataccattcctgcaagttaagtttgcaaaacagcctcacatttattataccaaaatcaatgtattggggagatcaaaatatcttctcataggggaaaaatagcaaatacaacttggagaaaagtgactttgttttatacataaagtacagtaaatagctaaaaaaaaaaagtagaaatacaaatatgctatagttcatcgtgttggtatacattgtattccttgggagaaatgaagccatcaccatcatggtcattcttcttaaaaatatcttctaaaactgcatcctgatatgacttgtcacgtggcttctcatctttttcaaattccctttgcaagtagaggtttatctggaaggccaaaataacattcctttaattaaaaggtatcacagtgaatttccagtaactttaaggaatagttataataatgaaactcatgtgcaagattacttacagtaaatgatacaacagtatgaaaagctatttgaggttttatttttcttattctttgaagcaatgttttggagagaaacaggtcttcaaattagttttccctaagatgatagatggttagtggtacatactcgaagattaatatttaaactgaattttgttgaaactaaatgctttctaataatccatgctgttcctattatcaaaggaaaatcacgcatgactgccattagtgaaagaaacccaattggcatttctataatctctaaaactaatgaatatgttgtataatcaataaaacacaaccatggggtttgaaataaaatttagtattttaagtttttctatgcttctatagctctcctccaagtctacataactataataatctctttaataatgtcaaataaagaatcctgaagtattcactaattatataaaatttctatatgcaaacacacattaaaagtattgtccaatatagtagccactagccacatgtgactaatgagcacttgaaacatggctagatcaaaatgagatatgttactataaatataaaatatataacagattttgaagacttcaaaaagttatctcattgataattttacatcgatctcatattgaaatggcaatattatagatatattgagtgaagatataacattaaaattaatttcacctgtatctttttactttttaagatgtgactataaaaattttaaaattatatgtgtaacaattgtatttcctttggaaagcactaatccttataataactaaagaaagcaatgcacaatcatctggaggtaatgttcagtaaggctggcattatagaggcaagagtatttttgaaagctagagtttgagaggtttttagcaatacatatcccagggtcaacccattgcaagttgactttattttagagcaatcagtggaccttaatgaaggatacatcaactgttctcaaatgggactttggtcctacatgaggcagacacatttttttcttccagccaaagcttagcaatcctatgtaggggtaaacaatttttaataccttcaaatatttctcagtttctaagtaagtcaaattatttttacataaccaatattgctgatgcttaaacttgactccttttccagtaaactacagtacagaggtacaaaaagacagtgggtaagaacatgaccttaattttgctagtaatgggttccacactatttccactttttaatttaataaaatactgtatttcccccgtcctttccgtctttattaatattaaagaaagtttttctttttcttttttaaatgttccttcctgtacactgatgaaatagt

SEQ ID NO: 97457 - DNA, 36306 bp, Homo sapiens
ctcatgcctgtaatcccagcactttgtgagggcaaggcacgcagatcacttcaggtcaggagtttgagaccagcctggccaactcaggaggttgagacgtgagaattgcttgaacctaggaggaggacgtttcagtgaaccgagatcacactactgcactccagcgtgggcaacagagtgaaactgtgtctcataaaatataaaataaatggccaggcgcagtggctcacacctgtaatcccagcactttgggaggccgaggcaggtggatcacgaggtcaggagattgagaccatcctgactaacacggtgaaaccacgtctttactaaaaacaaaaaattagcccagtgtggtggtgagcgcctgtagtcccagctattcaggaggctgaagcaggagaatttcctgaacctaggcggagcttgcagtgagccgagatcacgccactgcattcaagcctgggcgacagagtgagactccgtctcaaaaataaataaaataaaataaatagtttttaattgggcacagagtggctcatgcctgaaatcccagcactttgggaggctgaggcaggaggattgcttgaacccagcatttcgagaccaacctgagcaatttagtgagacctcatctctgaaaaaaaaaaaaaatttaattagccaagtgtggtggcccgtgcctttgatcccagctacttgggaggctgaggtgggaggatcacttgagcctgggaagcagaagttgtcatgagctgagatcgtgctgctacactccagcctgggcaacagagtgagaccctgtctcaaaaaaaaaaaaagcaaagaaatatttcatatctgatgctgtacttagcagtattagtttatccttataatttcagcaatttgtttttattgaagtgtaattcatatgccataaaattaaccattttatttatttatttattttatttatttatttttttttttgagacggagtctggctctgtcacccaggctggagtgcagtggcgcaatctcggctcgctgtgaactccgcctcccgggttcatgccattctcctgcctcagcctcctgagtagctgggactacaggcgcctgccaccacgcccggctaattttttgtatttttagtagagaccgggtttcaccatgttagccaggatggtctcaatctcctgacctcgtgatccgcccacctcagcctcccaaagtgctgggatcacaggtgtgagccaccgcgcccagctaaaattaaccattttaaagtaagcagctcagtggctttagtacattcacaatgttgtgcagccaccacttctatctagttccaaaacattttcatcttaacaggaaaccctacacccaccctatacccatgaagcagttaacccccttatgctttttttttttttttctttgagatggagtcttgctcttgtcgcccaggctggagtgcaatggccagatctcagctcactgcaacctccgcctgccaggttccagtgattctcctgccttagtctcccaagtagctgggattacaggcacgcgccaccacacccagcaaatttttgtatttttagtagagatgaggtttcaccatgttggccaggctggtctcaaactcctgacctcaggtgatcctccccccttggcctcccaaagtgctgggattacaggcatgagccactccgcccaccagagaccctgtctttaaaaaaaaatgaaagaaaaagaacaagcagaaatgtaagacccaggcatggtagtgtgtgcctgtagtcccaggcacccaccctatacccattaagcagttaaccaccacatgcttttttctgttttttgagacggagttttgctcttgttgcccgggctggagtgcaatggtgcgatcttgactcactgcaacctccacctcctaggttcaagcaattctcctgcctcagcctcccaagtagctgggattacaggtgcctgccatcacgcccaactaatttttgtatttttagtagaaacgaggtttcaccatgttggtcaggatggtcttgaactcctgacctcaggtgatccaaccaccttgacctcccaaagtgctaggattacaggcatgagccatggtgcctggcctgctttttttttttttttttttgagacggagtcctgctcagtcgcccaggctggagtacagtggcatgatctcagctcactgcaacctccgcctcccaggtttaagcaattcttgtgcctcagcctccggagtagctggaattacagacatgtgccaccacacctggctaatttttctttttcagacagagtctcgctctgtctcccaggctggaatgcagtggcccgatcttggctcactgcaacctccatctcctgggttcaagtgattatcctgcctcagcctcctagatagctgggactacaggcacatgccaccacgccaggctaattgttttattttatttatttatttattttatttatttatttttattattattattttgagatggagtcttgttctgtcgcccaggctggagtgcagttgcccaggcaacttgcactgttgcccaggctggagtgcagtggtgccatctcagctcactgcaacttccacctcccaggtttaagcaattctcccacctcagcctcccaagtagctgggattacaggtgcttgccaccacacccatccaaattttgtatttttagtagggatggggtttcaccatgttgaccaggctggtctcgaactcctgacctcaggtgatctgcctgcctcggcctcccaaagtgctgggattataggtgggagccaccactcccaactgaattttgaattttcgatctagatattctagatattcctgatttatggttttttttttttgagacagagtctcactctgtcgcccaggctggagtgccagtggcgccatctccgctcaccgcaagctccacctcccgggtacacgccattctcctgcctcagccttcccagtagctgggactacaggcgcccgccaccacacccagctaatttttttatatttttagtagagacggggtttcaccgtgttaggcaggatagtctcgatctcctgacctcgtgatctgcccacctcagccttccaaagggctgggattacaggcgtgagccaccgcgcccggcctaatgtctatgctcctcaaatgtcttttgagtttggcctgtgaggttatttttcctgtgatggctgtgatattggagaagatgtgtactggcctcggagttccccatcgtcccctctgtgtttgtcagttgggctctagtggcctatctccctggcacaacaccccaccctacccctgaggctgcagggtgtgcagtgccagggtgggagctatacggaaactttgcagagcaaagaggtagactaagagggcacctgttcattctttatttgaaaaatgtgttgggaccgggagcagtggctcacgactgtaatcctagcactttaggagaggccaaggtgggaggatcgctgagcccaggagtttgagaccagcctgtgcagcaaagtgagaccctgtctctatgagaaatgaataaataaaattagctgggcatggtggcatcttagctacttgggaggctgaggggagaggatcatttgaggagtttgaggctgcagtgagctgtgattgcaccactgcactccagcccgaagtgacagagcaagaccctctctctaaattaaaacaaacaaacaaacacctctaagatcttaaaaaaaaaaaatgtgttggggccagccaggttttgaggataccagagtgacaagaccgacagggtcctgcccttgcaaagtccacagtatagatagaatcttaatcagtgatttccaccaatccatttctgcctgcaatgggaactatgaagggaaaggctcagggcagcccagtccagatgaggggtggggtggggtggcagggcatgtgtctgagaaatctgaggggaggtggtgctccccaccaagacctcctggatcaggaggttttttgtttgtttgtttgtttttgagatagagtcttgctctgttgcccaggctggagtgcaatggcactatctcggctcactgcaacctctgcctccgtggttcaagtgattctcctgcctcagcctcccgagtagctgggattacaggcacctgccaccacacccagctaatttttgtatttttattagagacggggtttcaccatgctggccaggctggtctcgaactcccagcctcaggcgatccacccgccttggcctcccaaagttctgggattacaggcttgagccaccaggccggccttggaggttttttgtctgtttgagacagtgtttcgctcttgctggagtgcaatggcgccatctcggttcactgaaacctctgcctcccgggttcaagtgattctcctgcctcagcctcccaactagctgggattacaagcacccgccaccacgcccagctaatttttttgtatttttagtagagacggggtttcactatttgaccacgctggtctcaaactcctgacctcaggtgatcctcccgcctcagcctcccaaagtgttgggattaccggcgtgagccaccgcgccaggcctggatcaggaatttgataagtgagggtagggacagaggctaggtagatgtcccccagagtgaacagtgggtgatgcccagaaactataggtctcaggtgagagagagagatttgaagggctgaggctgcgaggtgggtggcgagggatgcgcctgcagaggtcggggtccggccgcattgggcagggccttatgggcccggagctagtaggattttccttcagaagaggcggctctacgtgagcaggggcgagggcagggagtccagtaggaaggccgctactgtgggcggccgaaggtggcgtgaggggcgggggggtcaggtcggcgggcccgctgcgggggccctgggggaggggtcagagggtggtaagctcgggggtcgtcttgcggggcccagcggctctgattccgtaccccccaccccaagggctggaggctggcagtaggcgtagtcagaggacgccacccgagccacgcgagggagaagagtggagatagacaagtaagatgggctctggggttttctgatagagaaaaaaatagtaaagccagctagataagtaatctgaagcagtggagaagaaagtgaaagaaacgttaaaagcaaataagtaaacggcttggatagaggaacacccaggaggcgagatagagaaagttaaaatgaagggacttggctacagcacccagtgcactgtcccaaaaaggcaagcgaggcaagcggggcggggaagggtgggtgtgcgtgttcttcctgcggaggacgcagcagcccctggggagggaccgagaatccccagctgcctccaacaggagaggctgcagctagagggcccagggctgggacgggaccttcgcgggggtctggttcccagggtcgcggagaaatgggatgcagacgctggaaatgggaaggaggtatacggggttggtgggaggccctgggcaggtggcttctgcagtcctgggccggtccggcctaccctgccccgtccctaagtaacagagcgcttcgtaagcccagggcgcagagccaggacactccgcgacccatctcacggagccctaaaacaaccccgaggtggaagtgtgtttcccccattttacaaatgttgcatctggggctcagagagggcggcctctcacccgaggtcacacaggaatcgggcccgcccccaggccgtggagccactaggagtgctcccgcccaggggtcttcccgccaccagggcccccgctctgggaggagccggccgagcccctcccgctctccgcccccgaggggcggcccggggggcgggcggaggaagtgagcgcagcggggaggaatgcgagcgggcggggcgtgtcggcccggggcggcggggacagcggcggggacagcggcgggcggctgggacggcgggtgcggcggggccgagcccgcacgatgcctcacttcaccgtggtgccagtggacgggccgaggcgcggcgactatgacaacctcgaggggctcagttgggtggactacggggagcgcgccgagctggatgactcggacggtgagggcgcgttctgaggggccgtggcggggcagcggggcctgccacccggggccgccatcccgggcccgcgcccgcacctatcccgggaccttgcgcgcacacgtcggtgcggactcaactttttttggaccgcgccgctgccactggctccccgccctgcgcgcgcagacacgattttcctcggcccccggcgcccgcgcccggccgctttctccaccccagctcctcccctgtgggccccgggcgggggctgcagacgtggccgcccagggaggccagccggccgggccgcccggcttggggacagggccgagaccccatctcaggcccttcccggcccttcaacttcggtgaatcccacatccttttctcgcctcggttcctcatttgagattcagcgtctttgcctttgagacgatccgctccccaactgcccaaacccctccgtgtgcctctctgcgcctacctgcactctggccagagtgtgcctactggggggtctatgggtaactgcccgtgagtgcgccggtgtagatctgtagggacagtgggcctcagtgaagcactcacatggagccggacgtgtctaggcacttgaagtgagttaactcgtttaatcctccagcatcacccttgggataagtactgttactctcattaggaagcagtgaagggaggggtggcggttatataacttgcccaggggcagtcaagcctgggtttgagattccagcaccttaactctttaacttaggtgccagggccgagaggtaagccccatctccctcctccttcctcccaggtgcccgcgtctctccacagccctttctctatctcctaccccaggaggccccccagagggctgttcttgttaaggcccaccctcggagcrcgaacacggctgaggacatgtgtctgtgtacgtagtggcatatgcatgtgtaattgtgcttgtacaagtgtgtagctgtgggtatcacagggtgaaggctggttcaggtcagggcattctcacagcccctgtttcctgcagggttgacagtgatgaggatggtgatttgactgatgataaatgcctgtgatatctgtgaccgatcatgatggagatatgtaggaagtgtgtggttgacacgtgtcaggtgacgttgtctggacctctgatccatctgtgatggtgacacgactgagatgatccatgcccaatgtgaatgatggctatgtgtgtgtatcacttgactgccatgtgcagaggtagcacaggacagtggcatgggctgctggacattgcagaggttttacaggcttgacagctgtgtgagtgccccagcctccatgcccttgtctgcccctagcttgattcaagtggtcaaagcaaaagccagcattcctgcttccctaaccctgggaggacctctctccccagagggtagactgggctgcatccccaggatcagcctggaccagtgggcaggcagagctgagcctagctgctggccccaccttggccacgccttggcccctacagggtgactggagggacctggagctacattggctgagtcctgctagatccccgcaagctaggccagctcctcccactgcctcccttcctctttctcctcctcttactcctttccagccagaccttggctgtctacaggatgggggacaccctgagccccggtgagtgattttgatccttggtggggactgcaaagggtcagagggcacaaagcacagtgagcctcagatctatctcctgccccttccccagttcagtgcccacacctctgctctgggaggcctagatgggcttgctcatccagcccaccttggcctgtgggcagggggtagggaggtgctggagggggcacctcaggcagatgtccgtgtacacagggatcaggagggtcacctggatccccacctgccactggtgcagtcacagttgctggtgggaacacagttgtgtagctcacaggcagtccctaggcctaggccatattcagatttactggggatctcaggtggtgtctgagcagcttcagcctggcaggcatgtccagacctgccctggaatttttggaatggctgaggccagaacaggaggtctgaagccgagggcagtacagacatccaggcactacttagacccttacattcccacaagcccttgggagctttgggggaactccgaggagtgcccactgggygtctggcactaactgtcccttttctagtscatctgggcagttggaaaaacaagtgttacaatctccacttcatagaagaggaaaccaaggccgcacagggagtaagcatgtctccctgggtcacacgggggaaggtctgggaatccaagccagtctgccgcagtctgaatgcccagaggcctaggtatgcgtaccctggccaaattgcagcactcttctctatttttaaagattgtgctgcatagatggactggagtctgtagtaggaacggaacctgcagctccgcccctacagggctctgatggaccctgggacccagatgtggccttctccctgggtgaccttgcctctgaacatctttgagcttcactctccttgtccctaaaaggtagtaaatgctctctactggaatgttgctgtgagaactagagacaacttttggaagggccccgagccatcctagagtgatagctgaagggacaagggataggctaggtcttagaggaccatttacaggcatttgtggggagctgctgtgtgctcagctgtatattttctggatagcaatacagtctacccagaaagaccaggcaacagtgatggggcaggctgtagtacatgagtttagaataaattataattgatttccagcctacttccacaaaagaatcagaagaaatagccaacaaaagtgtctccccaagtgattgttactctcaggaagattgaaaaccatgcagaggaagggggcaagcactcaggtgagacagatggtgactttatctaaagagtaaatttagcttggagattcctggcagccaaagcagaaagagaagtaagacgagctgtataactggcattttctgacaaaatgaagcacctgatttatcaaagggagacactttttttgtcacaaaaatccaaaagtaattttcaaaggcttttcactgaagagccattaatgtcattaatgtaagaggcagagtgttactgggttttcagatttttcttgggactccttctgatcctgaacaagcatggagggtacagcagatatcatagagtgtccgacatgaccccgcctggctttaacatgacacggtggactgtcttgacctctggctgcctttgtccactgtgccattggcattgacctatgtgaatgtggggctgagctgcttggctcacttagctagtccaggttgctgggtgtagcaggtgtgccactttcacatgctgtgggaaggaagaactgactttgccccagaaactgtcatgggcacacttgatttgttagtttccttgggggataaagaatccacagcacagcacctgctgagtggttgttggctcagagaaagcaattgaagcctcatgctgatagcaagagatgtatcagatacaggrggatgcctcaatcagcattctcagctgcagtcaagaaaaatgaattgtggcctatgtaaacagaaaaggttggcrggcatggccagtgcatggcccaatcacaccactagcctgggctggtggtgacagttctgttgccatctccatcactggacaccatgccagtccttctcatgtcagaactacatactgctgccatccaacaccaagatgtgtgctttccatttgctgtgaggccttgagccagggccggggctgcgagggtagctggggtggagggaacactcagcacctagaaaacgagtgcttggcgttctgcttggtgggaagctgggaatggcacccaccgagactcataagggacaagagttggaaaacagggaagaatgaatgataggaggccagaaaaaacagtcgagctttgggagttgaggcaggcttattgaaaaggagcatttcactccttttggcgagatttctcagagctggggcactggctcatcagcctagggctgtaggcggaggtttgcctggggcaagcggcgggatctgcgggcaagggggccattgtgttgctcctgccagcagtcccagctcccatttttctccctgctcagtccgacacccacccgtccgactttcttaggcaaccctagaaggctcctggaatccacttccgctctccacggcctggggcttgccccacctcccggcatgccccgggctkccctgcaggacgccccccgcgcagtgcatggtggggtagccagccggccacctttgggccatggcagccgraggtgctgtgtgcggcttcgtctatctggagggcactgcctgggcggtccctgaggacaccgaacccttggcatcctgcacattgggtactccggaaagaccgggaaagggactggggcgtggaggcgatctgggggcgggtcaaacgctggccccgcccctctgcaggccccgtccctcagtgtccatacgtgcttgtgctagggcgcctgcgccstcacctggattcccttcactggagggaatgatgtcccaggttttggtcactggcctctctctggctatccctgggccttcmagagcattggcacggtgccatgtgaaaactgagttgcaacctggtgacactgcagctccaaagtgctccacagaaatgatttggggactggctttctgggaaggggcccaggctggggggctcaggaagcaggccctgattgtccctctctcttcacaggacatggcaaccacagagagagcagcccttttctttcycccttggaggcttccagaggaattgactactatgacaggaacctggcactgtttgaggtagctgaggagccattttgggccacaggtttggcacacagaggctttagctaagcaggcaggctggacacgtgggcctcctctgtcttgctcttcctctcatctcctcttgtgttcctggttctcatggcagccgggctgcagttcccttggccctttcaactgaaactgcctttccagaggccactcacaatcccacccccattgctacctccagggtggttcacctctgacttccttacaacccctcagcaaggaaacgcccgcttaggatttcccaactcaggatttctcctcttccttccactcctggttcttctccaagtccatggttcttcgctctcccatggattcttccttgtctttcttggttgacccttccagctctgtccctctctagttccctgagtcctggtccatttgcagctttaggggatacgtctctggaaagattcccaaatatctgcctctgtacttgagttttatcttcttcagactcaagctgagcagtgagatctggatttaagacgtagtttaagctcctaaactctgacccatgcattcagccactgcatggctgagtaatggagactccttaatctgccttttttttctctttcttcattttgagatggagtctcactctgtcgccccaggctggagtgcagtgacgcgatctcagctcattgcaacctctgccttccaagctcagcgattctcctgcctcagcctcccgagtagctgggattacaggtgcccaccacatgcctggctaatttttgtgtttttagagacggggtttcaccgtgttggccaggctggtcttgaactcctgacttctagtgatcctcctgctcagcctctcaaagtgctggaattactgctgtgagccaccacatctggccgaggctccttaatctccacatgcccccaagggccctcgtcttcctttctcacaccaaagcaacttctccctgtgtgtaggtcagaaaggagctgacagagagggaaaagctaaatgtgggcaggaggcaggtagaagcacagcctcgagaaggctgcaggagcagggatcatcgcctagaccccggtggggctgggggacctgagctctgggaggcctcctgacctgggaaagcagcaaggttctgcggtgaaggccttggcccagccccgcctgaggatgggctggaggatcaggatcccatctccgcgattgatgtgggtacttgcaggactggggtcaggggaagaccatccagggagatcagggtttgggcagacaagggagacttcacttgtcccagacatcactcttttgccctctttggttccctgaggtgactagagtggcttttttgtggggagggtaggcgtgagtcctagaggtgcagccatagccaggaggtggctgggcagagcaggcaggatgaagtatgccattgcccccctgccagccgtgttcttccctgccctctctcccctgaggcaggtggttttcacaaatgggctggcagtgattgtagccaaggcggggtagagagaagcagccgcggggctgggcctttgagtgccacgtgctggggtgtggtgtgcacacctgtccagttggatggcttggacttccccaggtaggaactgggatcaggcccaggcctgtctcagggcttggaacagggccagggaccaggcagctggctccacacagctggcacccacctggcccaatgccatcttgccctgtggctctgtttgcaggaagagctggacatccgcccaaaggtatcgtctcttctgggaaagctcgtcagctacaccaacctcacccagggcgccaaagagcatgaggaggccgagagtggggagggcacccgccrgagggcagccgaggtgagctggttggggcggcagaggggccacacctgggaagacagacacagcaccatggaattgactgtttccccacatggtggtgagcacactgggggaagtgggtgccaagcatagtgagcagggaggatgggcactgaatgccttgtctcaggaggctttaagaagtgacctaatgagaatccccccggggggcagagggccagggagcccctcaggaatgacagcaggagacacagctgcctgtactcagcctttactgtgtgcgaggtaccacaccaggcctgggttctcatatgtcatctgtacaacaaaaccaagaggcaggtgcttactatcatccccatttttcagacaaggaaatagtgtcagggacattaaggaacttgtctaaggtgactgagctagacaagatcaatgtgtaatgctgggagatggattcgtagattttatgggagacagatttgtgggatatgtaactatgcaaaatgccagatcagtgacattgtgtgaggctggctaagagtgttgcccttggagccaggaaccaggttgtctctcggaggtcatgcaatccagagcaagtcacaaaccctcctgctgctcgcagtgttggcccaaggctctattggcagaagcctccaacaaccccctgggttccttgagtgccagtgtcaggggacatgtgtatgtgatcggagcctgatgctgccttgtggggctttcctgtcccactttttrgtcactaatccagttctctggcccttcagccctcttctctttggggtgactgttacctctttgcctagctcctctgtgtcattgcggctcagtgtagctgagggctggggatttttctacatttttcatttggaggctagggaccctccctctccacacactgactccctgaggtttgggaagcagtggtgttttaagaggagctgacgtctggcactggctgtagtattctcagaggtcggcacaagcagaaggcgctcctggctgggataagccaggcctgcagcctcacacctggtcgtgagatttgggcctttctggggtggggccagcagagaaggtagaccccactgaagcgcgtctctcaccttgcccttcagggaggcaaaccagcccacacttcagagagggcagctgataccttgaggtcgcacagacctgaccctgaccctgtgcagccaggtgtgactagatagcagagaaccctaactgcgtctggccatgtctgtccagcactgcaggggtgtctcaacctctgagagtgctctgcccacagtgggtgacaggatccttaggtcagagcctcatccttgtcccttcaggccaagccagggagctggtggcggggagtgaagaggcccctgagaacggctagtgcacatctcagcaggaatgtgggagggatgcctgggccagagagagcccatcatcccttggcccaatggggaacccgtgaggatgcttagcttagctatccagcttacctggccacagggtaaggatgggagagggtgactgggtgtcttagctgcagtagttttttcatggaagaaggaggagctgggtcaagtctttaaggagtcagtaggaagttagggatctggggctgctgagctgtggtcctcacccagggcaggcccgagcaggggcctcggaaaaggaaggcttgaagcaggaagggtgggcctccgaccagaccatgccaagacccaaagcagcctctccccagcagctgctccagctccagcaccggcttgatgaccttctgaggctgccagaggttatttggggatgcagaaagcatttccggcccrccctgccctttcccacactgtccttttcttagagtgactcagcctgggatgggggtgggactgggagctcttgctgtcgctattctgtgggtggcatcctctgagaagggctcagacaaagcccagatgagggggatccgtcccctgcactgctccacgcaggacaggttgaggagccatttgtttttgctgaggctcttctgaagtcctttaggtcgctcacaggtcttgccccaggccaggacccttcaggaggggcattaaggaacttgtctaaggtgactcagctagacaagatcatggccatggagttctcttctccctagcttcagggcagcacgggcactgtctcgtgggtcttccctgtcccctctccccgtatgattttcactaatctagtcctttggatcagtgaggaggctttgctggggctccagtggaagctgtcagggccacacttcggaggctgcactcttgggggctcagtgcctcaaaaagatgtcagccagcctctgtgctctcagcctctgccctggcctcctggctggcccctactctgccctgagttgagaaagcctgcctggatttgcgtattagatcttcctcacctgccctacagcctgagcactttctctgtaggattttcccaacaggatgtcccaggggcttccaaagcaccactcactgggttcagaagcaccttttgggtacctgcagggcctgctggtgatagaaccataaacaagccaagcctgccctaatatagtaacaaaatatacaagcacattctgttaccatgacctgtagtgaccactgtgatagggagtatcagatgccaaaggaatgtgagagggagaaccaactccacctgaggcaaccttcggacatcttcccgagagaggtaacagtttcactgaagagtttgccaggccgtgaggcagggccgactctcccaggcagagtccagcacattctcaggttcgcagaatctgagggacccatgtggtcaggggctggagctaataagagaggtgatgggacacatctggtggcccaagccaaggagttggacggcacactggattacaagacaacagagggttttcagcatgggtgatgagattagacttgctttcagagacctactatagcagcagagtgggctggagtgtggagaggttgacaggctcaggagggtaccacccaggtgccccaggttcaagggactaaggctgggacaaggcaggctgatctcagggcagcagggagacagactgggtaggagttagtgtctaccgggactagagttgggggttgagagggagggccagggatgacttctgggactttggcttgggtgacttagggcctgctgggtgagaaggtggagatctgagacaaacctctctttctagaagtttaacagaagagaggaagggaaggaggcagtaccttgagagagagttaaggttccaaagttcaatgtgggtttttaaaaagaatcaggttttacaccttcccagactcaactgtcttcctatatgaaagtcaatagagacatcctagctgtcacccctactctctgtgttccctggggccccactgggggagggggcctgctgagtgactagggctgactctccatggtgcatgcctctgatgctctactcrccccctccctttgtgttcgcataggcacccagcatgggcaccctcatgggggtgtacctgccctgcctgcagaatatctttggggttatcctcttcctgcggctgacctggatggtgggcacagcaggtgtgctacaggccctcctcatcgtgcttatctgctgctgttgtgtgagtgtcctggcgtgggagggttgggctgggcatgggccacggctgcccccacagagcccacccagctgagccgctcacccrggccctccttcccacagaccctgctgacggccatctccatgagtgccatcgccaccaacggtgtggttccaggtcagtgagcgccacccaaggcctggtggaagagaaaaggacccagtatctgccttgacctacctgggaacccccatagcacacccctgccccaagcagttctgtagtgggctcccaatccctgatgccaggacagtgcccacgtaggagctttcctgcttgacagagttggagagtgccattgtggtttttgttaatataaaagcaataccaaaaaagaaaaaaaaagggcaatgtatgtttactgtaagagggtttgaaagtgcaaaaaaaggccaggcgcggtggctcatgcctgtaatcccagcactttgggaggccgaggtgggtggatcacaagggcaggagatcgagaccatcctggccaacacggtgaaaccccatctctactagaaatacaaaaaattagccgggcgtggtggcgggcgcctgtagtcccagctactcgggaggctgaggcaggagaatggcgtgaacctggcaggcagagcttgcggtgagccgagattgcaccactgcactccagcctgggcgacagagcgagactccgtcgcaaaaaaaaaaaaaaaaaattagccaggcatggtggtgggcacttgtaattccagctacttgggaggctgaggcagagaatagcttgaacccaggaggcagaggttgcagtagtgagccaagatcatgccactgcactccagcttgggtgacagagcaagactccatctccaaaataaataaataaataataaaaaagtgcagaaaggtatagaatggaaaattaaaagcacccataatcccaccatcctgaaatcactactgttcgccttttggtatatataagtcttagggtcttatgaagtattgcacacgcacactctatttacataaattgtatatatatatatatatatgtgtgtgtgtgtttgtgtgtatttcccaaaagtatatgtgtgtatatatacatatgcatttatgtgtatatgtttacgtgtgtatgtgtgtgtgtatgtttcccaagtgttgaaaacagttttttgattttggttttttgggttttttttgagacagagtctctctctgtcacccaggctggagtgcagtggcatgatctcagctcactgcaacctccatttcccaggtttaagcaattctaagtgattctcatgcctcagcctcctgagtagctgggattacaggcgaccaccacatttttgtatttttagtagagacgaggtttcactatgttggccaggatggtttcgaactcttgaccttaactgatccacccacctctgcctctcaaagtgctrggattacgggtgtgagccactgcaccctgccgaaaatggttttttgaaaacaggattctccatggtacaccataacctaattaatgtgattattctcctgcctgtgggttccactttttcaccattgtatacattgttgtcatgaacatccttgaacatgaatctttgttcatgccccagcagttcccttaggagagggtcctggaggtggattacggcatgaaaaagattgacttttcgtttatttatttatttatttattttgagacggagtgtgtcgcccaggctggagtgcagtggcacgatctcagctcactgcaatctccacctcccaggttcaagcgattctcctgcctcagccgcccgagtagctgggattacagacatgcaccaccatgctcagctaatttttgtatttttagtagagatggggtttcaccatgttggctaggctggtctcaaactcctgacctcaagtcatctgcctgcctcagcctcccaaagtgctgggattacaggcgtgagccactgtgcccagctgacatttttttttttttgagacggagtctcactctgtcgccaggctagagtgaagtggcatgatctcggctcactgcaccctctgcctcccaggttcaaacgattctcctgcctcagcctcctgagtagctgggactacaggtgcacaccgccacgcctagctaattttgtattttagtagagacggggtttcatcgtgttgcccaggctggtcacgaactcctgagctcaggcagtccacccatctcagcctcccaaaatgctgggattacagatgtgggccactgcacccggcctttttttaaaaatgtatatttttatcatttcctttttttagtagagacggggtctcgccatgttgcccagactggtctggaactcctgagctcaagcaatccactcaccccagcctcccaaaatgctgggcttacaggcatgagccaccacgcccagccaagattgactctttgaaagaatttcttgatccctgttcccagattttcaccagagacattgtctcagcagcagatacaaccagcaacatgagatgactcttgtccccctgtgcttgtcaccctggggcctggtcatgactctctgagtcttttaagggtgttagactttgatagaagcacagattcagggcagggagccgtggacactcacctggtggcaggcactgtgcggggccttagggccaaaaggctggatgagacagtccctcctctggtctggaggagtcagactaacaaaggcacaggcctcaggagggtgaggtgggctgagataggacacacccagccagaggaggctgtgggctgtgcacagggcattggaggatggtggccagtcagccactgctgcagactagagctgctcccgcaaagcagttatttccacgggccgtgctggacattcgagtcagatggggataggatcgaatgtcagcctagatgcttacccaccgtgcagccctgggtaggtctcccagcccctctactcatccacaaacaggaaaagcagtccctgtccctctgggtggttgtgcaggcttgtcacagggagaccccttgaagaagaaccagccttgacctgtgcacactttcatttctctgctgtagctgggggctcctatttcatgatctctcgttcactggggccagaatttggaggtgctgtgggcctgtgcttctacctgggaacaacattcgcagcagccatgtacatcctgggggccatcgagatcttgctggtgagtcaggctgagccctggccaactctggccatgtccaaacagtccctttggactccaaacagaaggctcaggctgttcatccccacatgtctggccaaggcctgggtattataaagtaggaagcctcttygagagacaaagacctttactcaggctggtcttcctttcacctccatgccagtttgggccaggcaaggcagaggcctggctgccttcacctcggccctggatgttccatccacctgggcaccattgcagccatggcaagggttccaggaactgttgtattcagctcagtgacagatcttggtggtgatgtaggcttccttctgggcttgtgtgagctctggccagctctgtgtcctccggggctctgtgccagggcacttcagatccaccttctccttgtccttcaatcagggtaagcagccacagaaccctgctggaggtcggcgctccctccacgagccccatgggagctctgtcagcctcagcttctcattccccagtgaactgccgtaccagtgggagaagaggcaaggagctgcgggaggcatggggtgacaggtgcccgcccctggggatccagagggtaggagatacctggagggactgcctggctgttcttgtctccaggtcctctacctgcagcaggaccctgcacctgaatcttctgatttgggggggctttggcttgttttcatttctcatatcccttctacattcattatgtgggatttgtcccttctcctgtttatctattcagccatgtcattatatctgtatggacttctggatatttactttattctttgggttgtaatccaatactatcattatttattttcttgctcaaactgttccactttggctatttaacgattcaggttggcatctatgtttggatcctttttgtttgcttgtttttaagtaacagctttattaacatataatttacataccatgcaattcccataccaatttatataccattgaaagtgtacaattcaatgttttatagtatattcacagagttgcgcagtcaattctagaacattttcatcatcccaagaacccccattagcagtcactctccattccccgccagccctggcaaccaggaatctgctttctgccttgggatttgcctattctgggcatctcatataaacagaatcatataatatgtgaccttttgtgactggcttcttttaggtactcttattttttatttttatttatttatttgttttgagatgcagtctcactctgtcgcccaagctggagtgcagtggcatgatcacagctcactgcaatttccgcctcctgggttcaagtgattctcctgcctcagcctcccgagtagctgggattacaggctcatgccaccacgcccagctaattttttgtattttagtagagatgaggtttcaccaagttgcctggggttgtctcgaactcttgagctcaggcagtcggcctcccagagtgctgggattataggcatgagccattgcgcccggcctattcatttatttttttgagacaaggtctcactctgtcacccagactggagtgccgtggtgtggtctctactcactgcaaccaccacctccgagactgaagtgattctcctgcctcagcctcccgagtagctgggattacaggcgtgtgccactactaccagtttttgcaccactaatttttgtatttttagtagagatgaggtttcaccatgttggccaggctggtctcaaactcctgacctcaagtgatccaccgcctcagcctcccaaagtgctgggattacaggcgtgagccacggcgctgrcctattttttatttttttttgagacggagtccccctctgtcacccaggctggagtgcagtggtgcgatctctgctcactgcaacctctgcttcctggattcaggcgatcctcctgcctcagcctccagttgctgggattacaggcacgtgccaccacgcccggctaatttttagtagagatggcgtttccccatgttggccaggctagtcatgatctcctgacctcaagtgatcccccacctcagcctcccaaagtgctgggattacaggcgtgagccactgcgcccggcctcttttaggtactcgtaaaaagaaaaccaaaacgacaagtttcactttccaaataagaaataaaaccctccttatccatcttcttgtttcagacctacattgccccaccagctgccattttttacccatcgggtgctcatgacacgtcgaatgccactttgaacaatatgcgtgtgtatgggaccattttcctgaccttcatgaccctggtggtgtttgtgggggtcaagtatgtgaacaaatttgcctcgctcttcctggcctgtgtgatcatctccatcctctccatctatgctgggggcataaagtctatatttgaccctcccgtgtttccgtaagtaacccaggaatttatctgggcattgcatggacatccctcccatgtagccagcctttgatgccccagatcccagagactgcagggtgggcacaggcaggggctttgacctgagcaggtgccggtgcttctgtccctcacagggtatgcatgctgggcaacaggaccctgtcccgggaccagtttgacatctgtgccaagacagctgtagtggacaatgagacagtggccacccagctatggagtttcttctgccacagccccaaccttacgaccgactcctgtgacccctacttcatgctcaacaatgtgaccgagatccctggcatccccggggcagctgctggtgtgctccagggtgggtcctccctcccgtcrtcttgctcttgagcccacaggctgagcaggggcacagagcacagagctgtccttgtgtggccagcttgggaacgggggcaggactggccgccttcccagccccccagtgtcctcccagcctggctcctggcagccgagtttggagtgagtggagcctgtctggccagcgtccaaggcctgcagcagcctgtcttccccagccaccagcccctgacactgcctggggatgttcccacaggatccataaaggcctctgtggaaggcgggcagtggcgggctctgggtgacggtggttcagccacctttgtctgtcgacttctagctgggcagctccttctctgtggtcagggtagccctgtggctgacgctgcagtcattgggctgaagctgttccctgagtccccaaagttgccctgcatctgcgcctctggctaggctgccccaaactacctggggtagtggggggcagctgtggtggtgacacagctacccctgcagaaaacctgtggagcgcctacctggagaagggtgacatcgtggagaagcatgggctgccctccgcagatgccccgagcctgaaggagagcctgcctctgtacgtggtcgctgacatcgccacatccttcaccgtgctggtcggcatcttcttcccttctgtaacaggtgagccctgcctgcctacccacccagccctgtccccaatcccggggagcccctgagggagtctcatctgtttttggaggcatcatggctggctcaaaccgctctggggaccttcgtgacgcccagaagtctatccctgtggggaccattctggccatcattacaacttccctcgtgtgtatcctttcccaggcctggggcaggtggggcagaggacgggaagcgcttggcctgtgtaygttgccaggtcacatgcacagacaccccacacactcatatatagctccccttctcatgcacacatgcacatacacaccacgagactcccagctgtaggtgtcctggtagtctggctggggtgggggcacgtggtactattcagggacagtggggtggcagaggccgagttttccttgacgccgccgcagacttcagcagtgtggttctctttggygcctgcattgagggtgtggttctccgggacaagtgagtgagctgggcccccctctttagsagcggctgggctttggcctgccctcacaccagctcccaaccccgtgggtggtcctaagcctgctggctgcctttggtggtctgtgccatccttccggacccctgacatccctcactctggtggcccctgcaggtatggcgatggtgtcagcaggaacttggtggtgggcacactggcctggccttcaccctgggtcatcgtcatcggctccttcttttcaacgtgtggcgctggcctccagagcctcacaggggcaccacgcctattgcaggccattgccaaggacaacatcatccccttcctccgggtgagcccctctgcactcccccatggcctggctgctcccaggccctcgcccggctggggagagagatagggaacacagatgcagcacgtcctgcccttattggcccccggggccaggcggccatccatgaggagctactgagaagtgccctgggcctggcactcacctgggcctggagctgcctggacccagaatcttcatggcctgtttagggctcatccaaaggagagaggcctggtgaggtggaatcagggagactggtgacacccatagggatagacacaggggcggcctgagcccccaaggcgggccctgggggtgagggaggccaggctggggtctggggcccaaggtgtggaatgggggtgacaggacccagcttccttcctggtgcacacaggtgtttggccacgggaaggtgaatggtgaacccacatgggcactcctcctgacggcactcatcgccgagctgggcatcctcatcgcctccctcgacatggtggcccccatcttatccatgtgagctggggccgggcagggcagggggatggggaaaggcttcctgaaccccagcacctccccgtggctgcgtctggtgttggaggtccagctgggagatgtggcaggctgcatggggagatgtggcctgacagggctcagcccacccctgcatttaggagcaagcctggcacctatgccaaagctataaggtgaccaatatgtccacacctccctgaggcccccagagcaggtggccggcagaccttcccactggacagggcaaccaccgcgtccctcatgcctccatgaagccactgctgccccttccatctgttagtttgttttttggtttttgttttttttttttgagacagagtctcactctctcacccaggctggagtgcaatggcatgatcttggctcactgcaatctccgcctcctgggttcaagcaattctcctgcctcagcctcctgagtagctgggattacagaaatgcaccaccacgcccagctaattttttgtatttttagtagagatggcgttttaccatcttggccaggctggtgtcgaactcctgacgtcagatgatccacctggctcggcctcccaaagtgctgggattacaggcgtgagccaccatgcccaacccatccattttcaaagtcatttgcttttaacattctggaatcagccaggcaaatctgcgtgccagtgccttgcagggagtggccagcatgtggtgactcccagggaccccgaggcagcgcttgtttggttgactctgtccaggctggggtcctcgcccaccctgctccgtggctgacgctccttcttgcttgtgcggttatgaaaggcctcctcttccctgcccactcagcctgcagacttgacaggggccctgtacccctgagcaggctccatcccagctacagccaggcctgctggagccagcaccctcttgtccacccccccacaccccttcctctcacccaagagcacacctgaaactgttttgccacagccatcttgggtggtgaccccccttgtgcccaaatcagaggctacatctcagcctttatctcgggcctcctgctgggagcccctgccccctggcatgccctgtgtgggtcctcctgccttcctgcgcacccgtcctcgggtgccttcctggagggctcatgcagctggccctgcccatgcgtgggactcccacgcccaccgcagtgactcttaagtatctctgactggttgcattcaaatggtccagcttatcttccatcctccccttcatgcatggcagcctctcatccagctggtcactcaggccagaggcctgaatgtggcctagagtctccaggcactgagctcttcctgctgcccctgcaccaccctcttcagctctgccctgttactccccttcctacctcctccaacagcaaacccttgcccatcctctgcgatctggctccgaggactcctccacagtagtctcattgcctcaggccatggaggtggcagcaatgaggttgagaagaccttgctgagccatgcagggcagggccgggccacgccccgtttctgggccaggcccagcctgacatcaggtccccagctgccgaggaggctgctcttcgccaaccgccctctgtgccgcaggttctttctgatgtgctacctgttcgtgaacctcgcctgtgcggtgcagacactcctgaggacccccaactggcggccccggttcaagtactatcactggtgagccatgcctctgacacgggagaccctggggaggccaggagcctcattctgggtgaggcttgggyttcctgggtagggagctcttgaaacactgtggggagggagattatagggctgcgggggactggacctaggtcttacacccagtgacctgaccacccacctgggacctcccacccgggacctgacagggctaccagggcatgggccaggctgtggccaggggtcctcctggtcctgccctgactctgccctcccctctcgtccagggcgctgtccttcctgggcatgagtctctgcctggcccttatgtttgtctcctcctggtactatgccctggtggccatgctcatcgccggcatgatctacaaatacatcgagtaccaagggtgagtgagcactgccacctggcctctgccagctgagggggcccggccgagcaggcagggtggtctggcattggggtgggcagggagctgggccaccgtgggtgccaggactggggactgtaactcaggacccctgggtggtcttgaggggcagaacccctccacctcgcatccacatagacagaaccccctgggcggcaccaggggctcaccagctgtggtggaatctgcagggctgagaaggagtggggtgacgggatccgaggcytgtccctgagcgctgcccgctacgcgctgttgcggctggaggaggggcctcctcacaccaagaactggcggtgagttcccgccagaccctggccagggcgcagaggttcttaggggtcgctgtcggggtcagagggtcgagaggtgccggctccccatcctggggctgcccggggcaccctcctgggccatgctacccaaacctgcagggaccacgacccgagaagggaagaagaggaggggctccctagaacggccggccctggtctcaggctccccccacccggccactgcaggccgcagctgctggtgctgctgaagctggacgaggacctscacgtgaagtacccgcggctcctcaccttcgcctcccagctcaaggctggcaagggcctgaccattgttggttctgtcatccaggggagcttcttggagagctatggcgaggctcaggccgccgagcaggtacttgctttggggagggagagctgagccagactacaggggtctggactgcagctggcayggaggggagggcccagtcttggccagggtggccagccaggcagccagcactgctgccacctgagagctggcacaagggggagccagcagtcccatcttgaaaacttggcctctgggtaggcagcttgttgcccccaggccctcctccacccaaaagtcgttttgttcccgaggggccttgggagggagcccagaggcaggaagctgatggcctcccattggccctgggtgtgttccccacagaccatcaagaacatgatggaaattgagaaggtgaagggcttctgccaggtggtggtggccagcaaggtgcgggaggggctggcccacctcatccagtcctgtggcctgggaggcatgcggcataactccgtggtgctgggctggccctacggctggcgacagagcgaggacccccgtgcctggaagaccttcattggtgtgtgaaggcctggggcctggtgggcaggggtgaagtgaggtggcagtgggcggagggccacagactggtggtcagccgtgctcctcctccccagacaccgtgcgctgcactacggctgcccacctggccctgctcgtgcccaagaacatcgccttctaccccagcaaccacgagcgctacctggagggccacatagacgtgtggtggatcgtgcacgatggtggcatgctcatgcttctgcccttcctgctgcgccagcataaggtagaccagggggtgggtgcagatgagaggggctaggcccttggaggagcagctgtgaccaaaccgcccacctggtcccttgcctcaggtctggaggaagtgccggatgcgcatcttcacagtggcccagatggatgacaacagcatccagatgaagaaggacctggctgtctttctgtaccatctgcgccttgaggccgaggtggaggtggtggagatggtgagccctctgccctgccctggccccgtggataccatgtcccrtgcagctgggtcctcacggccaaccctgtccccagcataacagtgacatctctgcatacacctacgagcggacgctgatgatggagcagcggtcgcagatgctgcggcagatgagactgaccaagactgagcgggagcgagaagtcagtgccctttgtggttcacgccagggcgggtggcagggtcaggcctttggagaccgcatcggtgggtgcggaggaatcagaatgactcaccgcagccctacccaagmtagtgctcatttcccggaggcaaggtggtcacattgggccagacaggccccatcccccttttcctatgggaccaaggctatctcctgcaattgtcctcaggcccagctggtcaaggatcggcactcggccctgmggctggagagcctgtactcggacgaggaagatgagtctgcagtgggggctgacaagatccagatgacgtggaccagggacaagtacatgactgagacctgggaccccagccatgcccctgacaatttccgggagctggtgcacattaagccgtgagtgcagcaaaaacagccccagcggcactggaatctaggggtggaggtggggtggggcagacaagtagtgttagatgggccaggggtggggaccctccttgcaggatggctcatggcgacctgtgactggctacactacgtgtagggaccaatccaatgtgcggcgcatgcacactgctgtgaagctcaatgaagtcattgtcacgcgctcccacgacgcccgcctggttctcctaaacatgcctggcccacccaggaacagtgagggcgacgagaactgtatccctttgtggagaggcaggcagttgggaggtggatagcatgggaggtcaagccagcggcttctctcctgggcacccctgggtgggcatggcccaggtggcccgggttgcccgttgattctgttgttgcctccttgacttgaggccctgcagacatggagttcctcgaggtgctgaccgagggccttgagcgggtgctgttggtgcgcggtggtggccgtgaagtcatcaccatctactcctgagcccagtgtcatcttgtggcctggagtcgaggtcttggccaggacataacaagctgtggtctggggtaacagcctcttcccagcacccacctgccagccctgcttgcctggccctgtcctggacccagctttgctaggtctccttggaaaccaggcctgggcctcaaaatggagatggatcccaggtcttgtgggaccctgggatgtttggggactttactatctagcaccccagtaggcctgtcctggccrgagaagactggtaggggccgagtggggtttgaaggcagccggcccggcccagcccaggagcgctatttattgcatatttattgtttggatgtcaccatcagagacgaagggaagggtagccagggagggagtccagcccagctgcctgcaggaagatctggctcagtctactatgggcagggccccccaccaagctgagccgaatggagacagctgagctgaggcctgactttttcaataaaacattgtgtagttctgggcctcctgctgccccggctctgtttcccctggcgccaagagaagaaggcggaactgaacccaggcccagagccggctccctgaggctgtgcccctttccggcaatctctggccacaacccccactggccaggccgtccctcccactggccctagggcccctcccactcccacaccagataaggacagcccagtgccgctttctctggcagtaggcaccagggctggaatggggccgcccggctccccatggcagtgggtgacgctgctgctggggctgctgctccctcctgccgcccccttctggctcctcaatgtgctcttccccccgcacaccacgcccaaggctgagctcagtaaccacacacggcccgtcatcctcggtaagcccccaccaggcccctgatgcaccacgccagaccctggggagcctgggccccagcccctggcagctgacctggccaaagcccttctgccctgcataagccccgacataagtacctgccctggtgtggggaggggccaaaagcttgtcccttagaggaatgacgtcccttctcccaccacactgtgactctcagttgtctaacccagggggggcggagtgggggacggggtgtgcctgaggtcttggctggggcatcacaagctgtggtcagtcacagccacaccagactctgggccaagccccaccactccttccttggcccccacccaccaaggacaagatgcccagcccaggatcggtgagcaggagaggcccatccatgcccggcccctattaggcccagcccccatgcccccagacctatctgttcccaccttggactttggcaataaaggagcgccagactgggtgtttgctctgcagaggcaggggtcagcggccttggcctcagcacctcagcgccttcccttcctcagggaagcctgggctttggctactggggggacagcagggagagggggtgtaagcaggggagggtaagtgtgctttgtacctgggggttgagggtatgggaggtggggggtgggtctggtcactgcagcatctggggtgacgggggtaagggtcacggggggaatccagagtccagagtgagggctgctgctcacagtgcccggctgcctggggaatcagctagaagccaagctggacaaaccagatgtggtgaactggatgtgctaccgcaagacagaggacttcttcaccatctggctggatctcaacatgttcctaccccttggggtagactgctggatcgataacaccaggtacagccatgtgctccaccctagccccaacacgctgccccttggctactggctgctgagtggcacccccgccccgcagggttgtctacaaccggagctctgggctcgtgtccaacgcccctggtgtccagatccgcgtccctggctttggcaagacctactctgtggagtacctggacagcagcaagctggcaggtttgtgtcagagggcagggctggggctccaggcctgggtgctggcccacagcaggcatggcccaagcccccggtgctgctggtccccccacagggtacctgcacacactggtgcagaacctggtcaacaatggctacgtgcgggacgagactgtgcgcgccgccccctatgactggcggctggagcccggtgagtgtctctgcggatgaccggcttggggtggggcaggtgccccagaccccagctgccctgaccccttccacccgctgcaggccagcaggaggagtactaccgcaagctcgcagggctggtggaggagatgcacgctgcctatgggaagcctgtcttcctcattggccacagcctcggctgtctacacttgctctatttcctgctgcgccagccccaggcctggaaggaccgctttattgatggcttcatctctcttggggctccctggggtggctccatcaagcccatgctggtcttggcctcaggtgagaaggcctcgaacacttaggtccagcgatgggtgagaccaagctgatcctgggcctgccttcattgcggctcctgctcacagtggcctctaggggtgctatctaccactcctgggctggcatgcttgctgtcactggcccccagagcagtgaccctggcctgagcaattagggtggctccttccagagtctgtgtcagtgatggcaaaggggcagtgaacacagaaagtgaatcccagctatctgctcccagggtttgttcttgtagccccagagcctgcctgcccagcccttgcctgccttccacttgctcgcaggagtgcctttgcccagggatgtgcttcactgaggatggatctgccagagctagggccagaccccccgaggccccacctgctcttccctagggagtggcaccagggcccagcactgacacagctaccacctactccccaccccctgtaccctgggagctggtctggagagagaaacacagtctggacaagagaaacgctcatcagacaccaccaataaacatcaaacagacaccatcttgtttccccctttctggagcacaactctgtggcccccattgctgcataagccacacaaggagcagaaagacacatgcccgagggaggacagccagcaccgcccccaccatccccacacatcctgggcctcacccaccatccccacacaccctggtcctcaggaagccccgcctacttttttttttctttttcagacagggtcattctgtcgcccaggctggagtgcagtggcgtgatcatagccgcagtctcaatctccctggcccaagcaatcctcctgcctcagcctcctggttagctgagactataggcacacaacaccacacctaatttatttttgttttttagtagagatgaggtcttgctatgttgcccaggctggtctcaaactcttcaccttaagtgatcttcctgcctcagcctcccgaagtgctgggattacaggcgtgagctactgtgctgggccttttaaaaaatgtttatttgtttatttatgtattttgagatggagtctcgctctgtttcccaggctggagtgcagtagtgcaatctccactcactgcaacctccatctccccagttcaagtgattcttctgcctcagcctccctagtagctaggatcacaggcatgtgccaccacgcctggctaatttttatatttttagtagagattaggtttccccatgttggccaggctggtctcgaactcctgaccttaagtcatctgcctgcctcggcctcccaaagtgctaggattacaggtgtgagccaccgtacccggccctatttatttattttttaagctggaatctcactgtgtcacccaggctacagtgcagtggtgcgatcatagtttactgtaacctcaaattcctaggctcaagcaatcttcctgcctttgcctcctgagtagctaggactagaggtgcactccactaagcccagctgattttttttttttttttttttgtagagacagggtctcactgcattgcctagtctggtcacggactcctggcctcaagtgatcctcctgcctcagcctcccaaagtgttgggattacaggggtgagccatggtgcctgtccctgccatccttttgaagccctacagctccacccaacagaggtcttatcagggcttctcattgagtaagctgacactgagcatcattgaatatcaggcctgctcaagcctgtggcttagagtctgtgtctagattgggcagggacaagattgagcatctggctgagcctacactcagcaggttgtgggccaggggtagccaggcctggctccctgtcccaccttgctccatatccacaggtgacaaccagggcatccccatcatgtccagcatcaagctgaaagaggagcagcgcataaccaccacctccccctggatgtttccctctcgcatggcgtggcctgaggaccacgtgttcatttccacacccagcttcaactacacaggccgtgacttccaacgcttctttgcagacctgcactttgaggaaggctggtacatgtggctgcagtcacgtgacctcctggcaggactcccagcacctggtgtggaagtatactgtctttacggcgtgggcctgcccacgccccgcacctacatctacgaccacggcttcccctacacggaccctgtgggtgtgctctatgaggatggtgatgacacggtggcgacccgcagcaccgagctctgtggcctgtggcagggccgccagccacagcctgtgcacctgctgcccctgcacgggatacagcatctcaacatggtcttcagcaacctgaccctggagcacatcaatgccatcctgctgggtgcctaccgccagggtccccctgcatccccgactgccagcccagagcccccgcctcctgaataaagaccttcctttgctaccgtaagccctgatggctatgtttcaggttgaagggaggcactagagtcccacactaggtttcactcctcaccagccacaggctcagtgctgtgtgcagtgaggcaagatgggctctgctgaggcctgggactgagctgggcaccctagatgtacagctgcccactctcctggtcgagctgttgaggcagtgtgcaccgtgcctgcctctgtgctgggcgcggggactggagctggctccacccacagccctgtcagaggagcacggggcggtgggggggcggtgacaatttgagctgtctctcccagctcccaaaagggcaggtgagacgaccttttgagtgctgggtgaatgacagggccacaagtgtttagaggccgggcacggtggctcacgcctgtaatcctggcactttgggagaccgaggcaggcggatcacctgaactcaggagtttgagaccagccaggccaacatggcagaaacccccgtctctactaaaatacaaaatatttgccaggcgtggtggcatgcatctgtcgtcccagctactcaggaggctgaggcacgagaatcatttgaacctgggaggtggaggtcactgtgagccgagatcacgtcgttgcactccagactgggcggcagaatgagactgtctcaaaaaaaaagagactgggtctcaaaaaaaaaaaaaaaaaaaaaagttagaattaaaatctgggagtgacaaccattaatcagatcatttcactaatggaagtttaattactaatgaagctaaatgctctgagaaaagcttaggaagcacaagaggctgagcctttcaggtcagcaaagacttcccagaggaggcagtgcctacactgaggtcagagtgacaagaagagtaatggaccactgtaaagacttgggttcggccgggcgcggtggctcacgcctgtaatcccagcactttgggaggccgaggcgggtggatcatgaggtcaggagatcgagaccatcctggctaacaaggtgaaaccccgtctctactaaaaatacagaaaattagccgggcgcggtggcgggcgcctgtggtcccagctactcgggaggctgaggcaggagaatggcgtgaacccgggaagcggagcttgcagtgagccgagattgcgccactgcagtccgcagtccggcctgggcgacagagcgagactccgtctcaaaaaaaaaaaaagacttgggtttgacttgattgagcccaggagttcgagacaagcctgggcaatatagtgagacctcatctctacaaaaattttaaaaattagcctggtgcggtggctcatgcctgtaatcccagcactctgggaggccgaggtgggcggatcacttgaggtcagaagtttgagaccaccctgaccaacatggagaaaccccgtctctactaaaaatacaaaattagccgggcatggtggcgcatgcctgtaatcccagctactcgggaggctgaggcaggagaattgtttgaacctgggaggtggacgttgcggtgagccaagatcacactattgcactccagcctg

SEQ ID NO: 97458 - DNA, 16245 bp, Homo sapiens
acaggcccccgccaccacgcccagctacattttgtatttttagtagagacggggtttcaccaggctggtctcgaactcctgacctcaggtgatctgcttgccttggcctcccaaagtgctgggattacaggcgtgagccaccgcacctgcccttctatctgctttatacagactggtgtcgcacagagtacaggtctcaagactgtgtgttggccaggtgcggtggctcacgcctgtaatcccagcactttgggaggctgaggtgggtggatcacctgaggtcgggagttcgagaccagtctgaccaacatggagaaaccccgtctctactaaaaataaaaaaattagcggggtgtggtggcgcatgcctctaatcccagctacttgggaggctgaggcaggagaattgcttgaacccgggagttggaggttgtggtgagccaagatcacaccactgccctccagcctgggcaacaagagcgtaactctgtctcaaaaaaaaaaaaaaaaaaaaaaaaaaaagactgcatgtgttttagtgctcagattctatcctgggctttacatcccagagagattagagtctttactttgttaatgttagtttctgctaatagaagtaacagtatatgcaagcaagaaataaaatacatgacaccttttgaatgctccagccaaatatgtctttctctcacattctctctcttttttccctttttctaagtctttgtaaatccacccgcccctcggctatcaaaccagaattggcacaactaaaggagtcgtgccctctcgtatgtcatcccttactctgttctcattcacacctcagccctaaaagccctcctgcttctatagctaagattcactcaaagagaaattctgccgaaatgttttctgcaggaaaagacgaaggattgattttctagtttggacatttatcactttaagtgatatctgttatgtctcttgaattttagtagctaatgtgtattgaattcttattacaagccaggcacttcgcaaagtgtcatacgtgctccttgcagaaagtttggaaaattcagctataaaggagaaaatgaaatcactcgtaatcctattccttggggagccactgcgaagatttcaattatattgcttccagacttttgtgtacatccgtaaatgcatgtactttttaaaaagcaaaaaaaccacattgtgttatataatttgatgttttgttttttgcacataatattatatgatgagaacattgcaagtgtggtatcttggtgcggggtgccccaacttgtgtagctgctgatgctggctggttcgctccaggtgtgctctgtgggatgatcgcaatcgcagacgctgtcaagcaggaggctgccctggctgtgcacacgctgcagagcatgggtgtggacgtggttctgatcacgggggacaaccggaagacagccagagctattgccacccaggtacagccctttaatgttgcaaactgtgtaaagctcataaaagcagttagagacaaaagtaagcaccagttggcccagcactgagctgtactcctgctctttctcccttgctggatgcttttctctccacgtgtttcattctgtggccatgtagtgttgcacgtgagcactgtggtgctgtgcgaagatctcttccctggagcttgggcgcatgcatcctggaaaaaaaggagttccagggttctctaaccgtttcccagtctttgcaatggaaaaaaaagtatgtgacctaagggctgagatagacattttctaacctttatgttaagggaagattttgccagctcagctcttctcactggggtgctcagataagtgactcctgggcagttctccagcagcccctgatgctgagtttggtctgtgaggacagcaccactggatggctgcctgacttctcacacagcagcggctccagtttggattcctagaaattatgcacctccaaatgtgtgcagagctctaggcttctgaaagcttaattgtgttccttgagggaagcagcagtacccctgttttccatggtcctccttgctaattatggacctgtttagcgtccttccccccttttctggctagcacttgttcatctattcagcaggcacttacgaagcaccacgaatgtgacaggcaggtgtggggccaggctctgtgaggagtgaaggggggtctgcccttgacgggctcatggtcttgcaggaaggtggaccagtgactgtgtagatctgagaagcgggaaagggactaggaaaggaaaactgcaccttcccaggacagagcaggcagcaggagcatttcccaggggcacagagtagcacggcggtttggagatgccgcggggagctgaatggtatggtcaagtgtggcaccagctgccagaccctgggaccctgggactctgggaccctcggaagcagacccaagagttgagctgccctcctctgggagatgcatggggtctactggatgtgaagcaggagagtagggagggacatggccggacggatgctttggaaagaccatgggggcagcacatggagaagacagttggaggactgagccgtggacagggagaccagcaagggggttgtttgcacatccagaaaaggacagggcctaaaccagtgcagggtgttggggcaggagccagggataaactggccctgtgacagcaaacctgcagggtgtggttgaccaacatcactgactggacccagaggccgagggcagagggggcaagggtaacttgaggtttctgctgctatctgataccttttgccaacactaggcattgccttccttttgtcttaggttggcatcaacaaagtctttgcagaggtgctgccttcgcacaaggtggccaaggtccaggagctccagaataaagggaagaaagtcgccatggtgggggatggggtcaatgactccccggccttggcccaggcagacatgggtgtggccattggcaccggcacggatgtggccatcgaggcagccgacgtcgtccttatcagagtgagcgtggctgcagccaggctgtgggtgctgggagggcaatgggcagaccccttcctcactgtgtgctcctctccatcagaatgatttgctggatgtggtggctagcattcacctttccaagaggactgtccgaaggatacgcatcaacctggtcctggcactgatttataacctggttgggatacccattgcagcaggtaggcagctcttacccactgtgctccagctgcgcccagaaaggcttctgtctcccaggttcctgctggggttagtgagtggctcactcactggctggctagaggcgttttagaaaggctgtttttttttttttttcatgtcccctgctttatatgtctttaaatgagaaactgtggagaggacctgaaaccttcattcactctggtcctttctaaaaagctagtggagatgcttggctgtattttctgatccctattttattgtggccttattttctgagccatttgttaagtcatatagtctgagaaataatcattagtaagaattatggggcatctgctacatgctaggcacaattattggtgtttcagaaccttatcctgaacattaatcctgcccaagtttcactctgagttacacaaatgatcatggaaagaaatggctctttgaccaggcatggtggctcatgcctgtaattccagcactttgggaggctgaggcaggagggtcatttgagctcaggggttcaagactcacctgggcaacatggtgagactccatctctacaaaaaattttaaagttagctgggcgtggtagcgtacaccttagtcccatctgggagtacagaggctggggcagaaggatttattgagcccaggagttggaggtggcagtgacccatgatcgcaccactgtactgtagcctgggcaagagtgaaaccctatctcagaaaaaaagaaaaagaaaagaaatagatttttctgctttgtaattccccctcattccccctccttaagaaccatctctcccccgccccctgctccctgccccctgcccccaggaacatggcaatgaaaagttccagagtgctcctccatgggctgaggagagatcaagtttgtaatcacagcattcctgcctcagtctcccttgtgtctgagtggttagtggtgacttgtgtaacagggccttggcttcctgagcccagtgagtcaggcaggtttacttcttgtccccagagccggctcaggagcttaattcccccagtgtatgtgcctctgccacacaaagttgaccatacctgtctcctgaccctgtcctgggacctggctctcattcctcttctaaagatgtcatgaagccctggaggcgagatcatctgctagagaaggactgtggccctcagccgtgtttgtcctctgtgggactgtggctacaggatgggcaactggctccctcagctcctgccgcttttctcctcccgctcctcccactccttgtggtttgtcgctgccctggagctcgccctgaaatgggatgccacctgtgggtggttctgggaacatcagggcgagtggaagagagccaggcccactcaacagcatcccacacccagctttctaggaagcctcactttggggggggcctgtgggcaagatccattggcaggggcttctgagcacgccaggtggagacctcactgggggccgctgagggtggggcagcccggtgcctgaagccctctcctggctcctctccccagacctaggtgtgagtgcgagttctttcttccccaggtgtcttcatgcccatcggcattgtgctgcagccctggatgggctcagcggccatggcagcctcctctgtgtctgtggtgctctcatccctgcagctcaagtggtgagtcccctcaggtggagcatctgtgggaggctcccaggaggccttgtcattctgcatgcttagcacagtggaacttgcctctcatttcccattcattcacctgggacaaatgctgcagtggcagcccacatggagcctggtgtgcatgcatgtaacttatcagcaccatgagcaggcaattcactgctgcccattcacgtgctgggctgcccttactctgctcctcaagggctgtttatgtgaacatcaagcagacatgggtccctgtgtatgatctatcacttttttatttaaaaaagatgttcacttatttatgagtgcattcatttaacaaaagttagtggcagcctacaatgtgcaaggcatttgcttaggaagtttctaaatcaggtgagctttcctggaaccatagggagtttaatgtccttttccttggaaactcttgaggttttgatactgaatgttattaaaagatggatgagaggccttcaccaggcttagaaaaaaaaaaagccttgtttctagaatggctcagatgctgttgcgttcctgctttccagctataagaagcctgacctggagaggtatgaggcacaggcgcatggccacatgaagcccctgacggcatcccaggtcagtgtgcacataggcatggatgacaggtggcgggactcccccagggccacaccatgggaccaggtcagctatgtcagccaggtgtcgctgtcctccctgacgtccgacaagccatctcggcacagcgctgcagcagacgatgatggggacaagtggtctctgctcctgaatggcagggatgaggagcagtacatctgatgacttcaggcaggcgggccggggcagggacttgcctccactcaccacaagctgagcaggacagccagcagcaggatgggctgagctagcctccagctttggggacttccgctccctggatatgtccagtcatcctgccctgcagcacgcggccttgtctgggtgcagctgggcttggcctggagaggacggccctgcctgcctcttggcctcacgggaccgtcagcatgggctttgtcttggactctagtccttggctggactgtagaaggtgagaggcgagtcaccctcctcacagacctctgcttggagtatttaggatgactgctgtgaaatggagaacagtttcatcaggaccaaaaaacctcactgggcctttccagagaactgcagacctcactgtcagggtctttctgatgacgcctgtctgtgtgcatcatgtttctgagaccacagtttacctcaggtgtgcctgttgctttcttcctgcatagtctgttcctttcttcgtacatagtctgttccttttctctcctgtgtgcttgtcagtggggacccctcgcaaccctgcctgtcacctgggagggtgggaccaatgtccttgtggtctttgctgctgctctcaggcgcttctccaatgctctggagtgtgcatttcagcttgaacctgcttcctggctcacacatccccagccagggagcttgccacactcttcttcaagttgaggagagttcttttttgcttaaagcccccttctccatggagtgttggcttctcaatagagtgttgttgctgaccagctggagtgagggcctcagagcctgacctgagagtccgtactcggcttcctgtggggtgtaggttctcgcgattcaggacgtccttccatatccctgcccagcctgtggtgcttgaaacgtttgccccatgggaaacgtatgtgtgcaggagcctccctgcacggcccaaggggcttcgttttcagtcttctgactgtcacctcgtggggttcagtagagaattcatgtgactagcgcctggccttgtgtggcttggaggaaatggtactgcccaaataggaggaaaacacagcctccctgagcctgcattctgcacgctgcccaggggcttcagaaaaggagtggccacagcaccccgaagggagcatctrtttacctggcagtggctctcagagcagcagaacgggttcagttttagactctgaagttggttgtgattgacagaaccctttgggagcaaactagtagagttggattaaattctgggtgaaacccttttctcccacacaaaatagttttagtgatttttttcattgtccattacttgccaggggcagttttagcagcacttttgatagattacgtctaatcctcccaaccaaccagcagggtagctattactgtccacattttacaggcaaggaaacaggctccaagaggctgaggactttgcccaggatgacatagccaatggacaagcagtgtctgtcagctgtgaaggcttcactcttattgtccttctaccttgaatagaagttttcctgataagaataaacgaggaaaaggtccttgcctcctggaagaacaaatctaccaggtgatctattcattgtttcaactcagaatgcacttgattcaggaggtcatctgaccttcaccttggatggttagtttcactttttacatatagtttttgcagggttttattttataaaatccaagcgcgctgttgattgtgttttccttgttttcagccccccsactccagcccgcagcacatttccgctgtccgtcagtaattgtgtcctctctttatgcttgcttggggaatgttgttttctgactaggctgatcattatctaaagaatctaattctgttgatttttaaaacttttaggaccataaacgttgtgttcatatatggacatggaaatatttatataattttatagaaaataaccttttagatggtcaaagtgtaaggagtttttttgtcagataatcatttctacttcaaaaacatttcatgcaatattagaataaagttcctgtcattcctctaaaaatctgcctgtgagtgagatgcgtggtcagaggccagtgccgtcytgtcttcacgagggcttctgtgaggcactggcttggcttcatgtctttttagggggcagaggaggataggattttaacagtagggggaatgagggtgggcagagcccycttgatctgccatccccagcactggtgtgagtccctttctctaatgcaggcctgcctcagcggcgtgtggggagaacgctgaaaggcagctcctgtcaaagtccctgccccgctggatcggacacaggcttaaattaccgcatcgtttgcacccctctgttctagggtgagtgtctgcaaaaggctgttctcaaacacatctcaatcaggagggatatgttttgggttccttggccttgagggagtgagtcaggaggaggagcagaaaaatcttgactagtrggctctgctgggaaagctctgtgggcatcttggggtggccggggggtgtaagtgagccacacctgaagggagttgacagtgtaatcttcacccacaccaggacacttcaaagagtggaaggaggcactatgaatagttatgccaggacaactggcctaaaccgggactatccaggcaaactgggacatatactcaccttccttcaaagggaaatagacattgtgacatctccattgacacagactacgtactttagaaccttgcctgatcataggttccagagacatgctggtggcatagtccgttatcatatttcaaggttcycccccatatccacgtcttggtacctacacatctctgtagaatcattgaggtgattatctcatggctcattgtgactgcatagctagatggccagccccgccctccagcataccctggaggacttcatgccatgcgtgcttgactgtttttccggatgcctgggtacagaaatttcatgttgtgtgcatgtcccattgtgaaaagtgagggtgataccaccttaggaagggatcccatttctttagaagatagattctttctttttcttttttttgttatactttaagttctaggtacatgtgcagagcatgcaggtttgttacgtaggtacacatgtgccattgtggtttgctgcacccgtcaacctatcatctacattaggtatttctcstaatgctttccctcccctaatcccccacccctcagcaggccccagtgtgtgatgttcccctccctgcgtccatgtgttctcaytgttcatctcccacttacgagtgagaatatgtggtgtttggttttctgttcttgtgttagtttgctgagaatgatggtttctagcttcatccatgtccctgcaaaggacatcaactcatcctttttttttttttttttgagacgaactcatccttttttatggctacatagcattccatggtgtacatgtgccacattttcttcagtctatcattgatgggcatttgcgttggttccaagcctttactattgtgaacagtgctgcaataaacatagtgtccatgtgtctttatagtagaatgatttataatcctttggatactttctaaaacttgatcacattttcctgatatattcctcaggcagaataaatcacagcattccaaataacttttagtcttttaagaccttagtgaagaattgtgatgggattacctttttaataaacaaatgcagtaattctcattttttttcaaaaatgacatctggaaattgacatgttagaaaatagattctcaaattattctgctagattaccaaggaatcaagattaataaataaaamcttttttattaaagattaaaaataaaaacttattttttataaatccagcatagaccaaaatcagccaatcaaatagtttaattagaaagagattatttgaattgcwggggttttttttttttgctctaaaaaattatgacagtgttttagtaggtaaatttcctaatgtgtatacaattgagttagacaatttttatttgcatacatttttcttaattgcatctttgttttaaaaaaaaaacaaggaacgtatgtgcaaagaaatgctttaagcagccacttaggctgactgtcagtttccctttgcagattaccttgatgtgtgaggaagctgatttggtattggaaagtattgtggagctaggaggaatcaaactgctctattttcttcattttcaaactcaccttgggcaggcacgtaaacaccattgtccaggctttcattccagagggagatgtctactttgctgtttttctttgtgtgaagacaatgacagtggttgaaattacaggatagaatatgagaatgctaagtaatactgtgaaatcccagaatctactttattcaggaagatgaataaacagagatgtaaaaccatctaagggctaagatgaaaagaattaatggaaatttaacatttttgccctttgaaatggagacggctattaactgttctcaatttaaacataataactgcttatagcaaaaaattaagcatatagaaatatagaaagtggggggggggaaggcaaatactccctccccagccccaaaaggaaagccagtgaacatgacttcatggagggatgtcctttgtggatgaaccacatcgggacatggagggagcaaagccttcctgctccttgttgaccgacacctgaccaagtgtcagccatctgagacagaggtgctgcagtggcctcagagaggcctgttgagagcagatccaggtcctggtcaggtcaggggacagacaatgctcaaatacctccaggctgctgagtgctgggtgcctgggcaggttctgtcactcatcttgcctgtctggccctcctcacagtggcactaagagctatttgcataactgtcccatttccacagacgggatgaagccttaggttgttcagttgactgtccgggacacagaaggggcgttcaaacccatttggcactggcactaaagcctgtaatctattatgctccatctggaaagctccctcttcctcccaaaggtgaatgctggtgctttccttaggagttgaatctgtacttcctcagcatcccttggtccccttatgtggacaagaaaggtgtcctttggcaggacagtgtggcttatctcaagagccatcccgtgtctatctgaccaaaacaacctcctagtctgcagctggagccaatttaatcattttttatgcatctagaaatgcaagtatcagaaggaaaacatgggagaaggggaagagcatgaggctggaggttagccctgccactggatacctccatgctacaatatatgcaacacctgtactagcagcccagggttttagagcctcagatatgcatttagtgcagagtacatgttaggatgactcgacagtcaacgtatttttatcatcatgtgcatctgagcttcatgttaaatattcttgcaagtttatataactttttttttttgagatggagtctcactctgtcctcaaacaggagtgcagtggcacaatctcagctcactgcaacctccgcctcccaggttcaagcgattctcctgtctcagcctcccaagtagctggaactacaggcatgcaccaccatacccagctaatttttgtatttttaatagagacggggtttaaccatgttggtcaggatggtctcgatctcctgacctcgtgatcccctcatcttggcctcccaaagtgctgggattccaggtgtgagccaccacacccagcctggataactttttttaaggcttgaacattttttaaaagaaaaggtttttaaagggctcacagtatttttgatggctccaaagctccatgttctaccacctgtgtttgggtctacagaactccacctcaaacccctggacagaaatctgtcttcagcagttgattacaaagctaataccctggtagcttagaaaatagatcctcaccaaatccctgggggccactctacaaactgctccagacctctattttctcatctgtttgataagaactgccctcattactgccctgagctaggaggttggaaggggcagtccacaggaaacctgcacacaagtgcaaggtacgcagtggtcacaggcgatctcaacaggcagtgaatgtgtcatgccgtctccctcagatcatcctacctcttcgcagttgagtgcagtcggggcttcagccttctcatctgcacaaatggggataataatagttcctgtctcacagcactgccatgagggtatgatgaggtcatctgagtaaagcaattagaatagtgcccggcacatccggagtgctcaagaaatgctagcggctgttgtcatcgttgctgttaagagtgatgatgtctgtattctaggaaaaaacaaacaaacaaaacaaaccacctcagcctttgttcctggagcaggtaaaagccacctttctatgttgggccagaggaagttcctgttctggggcctgctgctaggacttagtggactgatgacaaaagtttgcctttaaaaagagctgcgtttgtccagttactggacaccaggccagacccccagttctcttggttcttggtggtctttgcatgtgtcctccacctcagtgtgccctgggtccagtggaagaccacggaatgtaggggaggttaatagcactggctttggagttggggcagacccgagttcaaaacccgactgtacccctcaaggaagtcactcaccattctgggcttctgaatcggtgtaaaatgagttcactgctgcctccgtggcttgtgaaggttaaggggaattatgtacataaaatgcctagcacggtgcatggcacacagcagacactcataaaaggcagtcatcattagaatggcactgatggggcatccccaagtagggactggagaggtaaaagctctcagggagcatctgggatggaatgggatgcaggctcctggaaaatatttattgaccgcctgaatgatgctggtgcacattggggattgaggacgtgagtgtaaagggtgctagtgaacaagagtgtggagatgaggaaagtgatgagttttaatgtggcatttcagtctggttttagaagacaggaccttatgtcattcagcccacctgccttatattcagtaattcgatcattttcagcaaccttttaaaatatctttaccttttctccaggacagaattacatcacctttagatatgaattcctaaagaatgtactaatttttgattaaaatagaacaatcttgctctgctgtttctgatgacccagctttgggggctaaatataaacctagcacggtggtgtggtacttccatcacagcagcgagtgggccgtggcatcgtgtgaatttaatcacagaataacctgctattaatagttcctggggtggggtggggagcagtgaggggatcgtctatttatttatttattttggaggaatatgggtgttttataaacttccattttctccttcctatttaatgttcggaattaatgccaaaatccatataagcttagatccagctaaaaatgttaacatgtattacttctgggaacctcaaagaagctgatattgcctgtttgtgacttaggatacacttacttgggtttattggggtttcctgtaaagtatgaagcactagatgctttaggctgggggctttgttttccccttaaagctccaccaatctctagttaatctttgtttttctgaataacagtgttttatatatatgtttgttttattattttattttttaaattgatagataaaattatatgtatctatgatgtgcaacatgatgcttagaagtataaatgcatcacagaatgatctagtaatgttttaatgttacttatgctatcactgtcaattatccttgctccctgtcccaccttagagcattcagaggataattccatccctcctgctcccagcatgcccctgtccccacccactgtgcgtgtgcgtgcgcgcacatgcacacacacccacacccacacccacacccacaaacccgccccaccccccccacccccaaccatgaagggaccttaacctgttttgcctctcacgggctcttcccttcttcctgagcctaaacattcaggctgctctaatgctccagggctttcccctgtgtcatccatgggtttactctgattacgccctcacctcggcagtggggaggactagtgaattgtgtccactgcccatgaagcagatctcctggagggacccaggttagcttggcctctcccagcaagtgggaagtcaccagaacgggggctgtggagctggaggtggcttcatccacagtgagtgaggaagagaaaagccacagcaaggaggtcactgcgggaggggctcccatctccaggtccccagggaagtcctgagcccatgctgagcctggaaggattcagggaaggcacagagcctgcctcaaggaaccagtgcagggaagacaagacacacacacatacaccacacacaccacataccatgcacacatagacacatacaccacacacacacaccacacacaccacataccacacactcatagacacacaccacacatatatgtcacactgcacacaccacataccacatgcacctcacatacatatatgccacacataccacatacacatagacacatatgcacaacacacatacctcatgcacatttacatacatatatgcaccacaccatacaccactgcacacataaacacactactacacacacagctaatgacagaaggagctccttgtcttaggagagggatttggtgaggagaaaaaatcatgtccggtctcagctttggggaggaagggtggcatctgggctggcactgaagtgtgatttcatggaagaatatgaaggtggaggcctgggtgggtaaggggtgtttaggggaaagccacatggtcagggcagaatgggcagagtgtctctccttggcaagctgtgggaggaagtgtggaaggggcatgagttaccaaggaaggctctggtacacatctctatgcatctctgtaactactggaactgaggggctgtctgggatggctctatgtgtctatatttgtgttttgtgtgtaggggtgtgtgtgtatgtgtgatgtgtagggatgtgtgtattgctatttataaacaaaccatctagattagtacaaggaaagaaaaaagttaattccacctttggtagcatctgttctaagaatcacttccttgtttgtttcaatttctatggaaagtgctcaccggcagtacttttgctgatgatgtaagatggcaattaagtggagaaattatcagaaagctgacacaattttctgctagttttaatcagttttagaagtcagtcgatgaaatgtgatgttcctgccaggtgcttagcttggtatgaaatgggactcctgtcctcaagctgctttgctagggggtgcctagacgaaggcagtggagttttgggaaaacaaatgagcaactaagaaagagctaaacagtggcgcattccttctaagtgcaagagaaatttagaaaggagtaatgtctagtaatgccaggaaggcttcccagaggaagaggtgtcaagggcctgaggtgcttacgtgtgctggctcgccccttgccagcagatcttgttatgtcaaaggttctgagaagtcctgcagcgtaaaatccgcatttcccaaacatactggtgggaccacagaatctctcctcccacaatacagtttatatcagatacagagaagagatcttctgggaatgctgctgagagagggtgagaactgagtgaggtcaggcacaggagggatttgctcgggaggggaagagagggcttatggtccaggtggtgcatgattgttgtatgcagtgggggtgcatcctggctgctggggagagcgggaaaggggatgagtaggctgagtggggccacactgtttggagacaggcagaattcaggcaggacggaaggaagcaggcacagccagcagtgctctcttctttctcttccaccaactcaggagactccaccatcccctctctgccccattctctgaactgtggccccaagaatgcagaagtgggggtcctaggaagaataacagggcagatgggggctccatccctagactcaaccccactggcaggattgtggagaccatcaacagacccagcaccccctctcctgggactgggggaaagaggaaaagaggtttttgtttgtttttgttttagagaaggggtctggctgtgttgcccaggctggtctggaactcatgggctcaagtgatcctcctgccttggcctcccaaagagttgggattacaggtgagagccacttaagc

SEQ ID NO: 97459 - DNA, 50469 bp, Homo sapiens
atatttgtctagaatgaaatcctgacttaaaaacttcagatcacagtaatactttttttctttttgagacagagtctttctctgttgccgagggtggagtacagcagtgaaatctcggcttactgcaacctctgcctcctgagttcaagcaattctcatgcctgagcctcccaagtagctgggattacaggtgcgcaccactacgcctgattaattagatcacagtaattcttaaatatgggtttaagtgtctaacaatatgaaaatattaattacctttttaataagtaagaaaataataatacaaaaagcaaaaaaataatacaagactcataaaaacaaaaccaaacaaaacaaaatgataaaggatatagatattaagtaggtgacctttatatggcaaaacactcaatgagttaattctttacttttttcattccatttgaaaagcaatggggaccattgatctcactgatatgggggatacagagaagcccagtaatttcaagtccttcataaatgcactgtgtgcacaaatatcactttgaggccgggtgcggtggctcatgcctgtaatcccagcactctgggaggccaaggcgggcagatcacctgaggtcaggagttcaagaccagcctggccaacatgctgataccgcctcccctactaaaaatacaaaaattagttgggcatggtggcatgcacctgtaatcctagttactgaatcaaggagaatcgcttgaatccgggagacggaagttgcagtgagccgagattgcaccattgcactccagcctgggcgacagagcaagactctgtctcagaaaaacaaaaacaacaacaacaaaaaacaagtatcactctcatatttacagtatagttcttgggattgatcttaacaccagctttagcacccccaaatggcacatctgaaagacaaggctgatggttgttattccatataaaggttaaaaaagtaaaatgacagaaaatgccacacaatattagaaaaacgtgtgatgctttaagcttgaatttctgaaagttcaagaaataaacctaccatagttttctaaactgtactttaaacaacattttattgaacagaaattgttcaataaaattggctagccaagttctaatatatatattttatataattaataataattaaccaataataataaatacttcaacctctaatccatagattgcaaatacaatgatagcttattttcttggggaacagcagttggtggggacagagggaatgggaaaaggacttttgctgaaaggagggatgacaggaacacaaggctatgggtgaaaagaagaacaaatagaacaaacagcagagagggcagctggccggggtggggtgggcgcctccctggccttgctccaggactcaggactgggtcctgcctgggccacccctcctgccaaggccctggcctcttcccagggtgactggtccactcctagaccctagaacatctgaagggcaggggtcccaatggcctgagagggtatgggccaggggcagcaggctgacccacctgggcccaaaagccacctgtgtttgggggccggcatgctgtctagagagagagtgccctgggaaaggggcacacgggagtttctctcctgagaagcccccatgcaggtcggggcaaaggagagggctttatctgccttgagggcagcgctccctaagtgaagcaggcctaccccagaagcacagggacttggctggcgcctgaacttcctgtgcgaagcagcacctgctcttggagccccttagcctgctggtgcacacctggtttccaagtcctgcctggggacttgctaggtgggggacggacctggaacaggaccctaagcccaccccctccgcatacctggcggtccagggctccccgcccagtggagccagcacaggctagccaggccccactcctgcgtcacccccggaggccaagctcctctcctgcactggtgccgtcctgcctggcaggtagttctgggggcagggtcaaaggagaagggagggccgcagccctctgggaatggcctttctgagccaccagtggctggactggggctctggcaggagttggggacattaacaacacccccatcctcccctgggctccacctcatctgacgctccagaaccccctgccccaagcccctacacactctgttctattcctcagcccctctcaacgtcctggcaccatggggcccaatgcctgtcctcccttgagaaggaacagctctggggcaacgggcagcggggtgccctccctgccaccaagatttggtgcctggagctggtggagggctggccgcatctctctggcacaccagctcctgctcccccaacctatggctttggggcagagcctgaagggaggaagaaggtgggggggggggtccgcggctgtttgtggcaaataagctttttttttttccttttttaatcctttttcttatgtaaaaagtgcacaaaagttcggcagtctttgcaagtgtcagcagtgtttcctggggtgggggaactgggaggggcaccaggcctggcacccaccttgcgactgaaggtggcctcgtattgcttagaaaggtatgtttcagtataaataccagacagtaaaaatagagctcgaggaccacctgcactgttgccaaatcattgccagaatgaatagcttaaataaataaaaaatagaaatatttacttctcaataaaaataaaagtaaaaccatttacctttctttgcattatatataatatatatttataacgggtctggctgtgggcagcggagctaagggcagcggaggggtcaggacatctcgatgacctccacgctgcccgagaagctcgcctgcttgcccatggcggccagctcctcgccgcgagtgcgcccctccaggatgccctcctcgaactccatctggcagctgcagcgcttgatctgcgtctccgtctccggggcggctcgtcgggccagttggtccgcgcgtcccggggctcagcccttgctgcctccggccgccgcagctcgctgccgccgccccgtctgggggcgcccgcctgaccaaagggcgcgaacagcacccgcccgccccttgcgcgccctgggggctgaagcactagggcccgtcgggcgacggcgtgcccggggagtcaagcggggcgcccagactccggggccggctggccagggccgggcagcctgggcgccgacagggaccgagaggccgaggctgtgcgcgggggagcggggagccggctgggggcctgggccgcccgcagggccgtgggcgcgcggcatccgggctgtcggggctgggcgaaggtaggctcagcgtggctccgacgggccgtgcagcttgcagagctttgggacctcgccggggtcgggtgacccggggccgttgggccgccggccgggggtgttcgctgatttgatgtacagcgagaaggagcgcttgaggcggttggtgtcctgcaggcggtcagaggagaggtacaggccgcgcaggccctgctgcagcgcgcaggtgtctgggggcgtggggggcagtgggggctccccgcccgcgctcaggccgccctccctggcagctgcactcccggtggcagcgctttctgaggtaggtggtggcagccatggcagccgggccccagccgcagggctgggcggaggctccggcgtccctgagggggtgcccgcatccccctgcacggtggccagcagcttcaggctgcgctcctactccagcagctggcccaggaagttgaagttgggcgagatggactggcgcctatccttcatgaacctgtaggtgtcgtcggaggatatgcccatggtcttcatgatgtaggcgatggcgatggtggcagagtgggagataccgaccagacagtggacgatgacttggcagctggacagcttgcctttacagatgaactccatagacttgtccagccagggcagcagcttttcacagtagttgtcgttgatggggacccgcatgaagcggctctcgcagatgaagtcaggcttggggcaggagttgctggcattgaggacgtagcttattccattctgtgtcgtcagatccttgttcagaacgtctttctgcgagcccaggtagaggtgaggcaggatgagggtcaggctcacgctaggcacgggcaggcagggctgggagaggctcatgggtagcagggcagcaggcttgccctggcagaggctggggaagcaggaggagaaggtggcgaagccccccgtgaggatggccacgctgtcgaagcagctgtccagcttgctcagcaggatggagaggaagcggtctgcggccagcacactggcgtcccgtgtgctctggtcatagaccaccatatcctgtggctcagtggcctccatttggctgcgtgtggccagccagatgaactctgcaatggtcaccttgcccttctgcagccggcacttcaccagcttggagcagcagatgttgacggagctgagcacatgccagctgttgtactccaggaaggagcggctgtagatgaccaggcaccctaggcccgccccgcagcaggctggccagcttcttggcgtccatcatcttcctcgggagccggtctccggccatggtggggcaatgggtggtggggagggtgacccctgacgtgaggaggggttgctcggatggcccaagtgtggccttgcactgggagtgacctagcacatggtgccggacctcgttagcgctcgcctcggggggcgttccgggggacccgcgctgccctcgccagctcggctgcgccgaccatgggccctttggcgggggcccgcgcagccaaggcaggggcggggtctctaatatagagttaatcagtgctctttacaacttctaaaagataatagcttatttactatccttctactataatttggtcttatttatagaatatgttgaggaattgaaaacaaagatctagacttaaaattcaataagctcctataaaaaaaatccctcacataaaaaaaggctatatattaatttagactaattgaaaaatgatgcaggtcttaaagaggacaacttaaaaaaaatcagttctgataaggtatatttctatagcatcttaacagtaaccatgtgagtaaacatatttccccagagttctcattaggtagcaagaaaggcgatcacttaccaaccactgcacacttgtatgtcatcagggaagccaaagtttttacttcatctacactcacatcaatgctgtaatggatatttggtggtgttttttttaaaaatgtgttggggtaggtgagaaagaaggggatatatttagaacaaacttcagtaagtttcaaaaaagaaagctacaaattgaaaatatccactttttacattttacacccaagctatgtccaaaaacacttgaagcagctcatatgtcagaacaccataaaaaatgaatataaaacgtttaaaaaactgctaataacagtaactatgatttcacaagacaaaaatcactgtgcaatgaatttttttacactttccagaaggcttttttatgttccttttaccttttggtttgggtgactccggggtggccaggaccaaatgtgtctccttctggctttttgcaccacaccaagtaacccgcgccaggccgcacagctgccctggccttggggaggactaaggcaagggcggtgtacgctgctccggagtcccaccgcaggagttgaggcagcgagttccgagggcggggtggggcggaatcgggagggatacggacccggtggaacgcactgcgtagacggcgccggcgcccgcactcagctgttgacagtctttcttccagctctcccctgaaagtcgtccaggcgccggtctcttttttctgcctttttgtttccctccggagagtcggcgcgacggtgaatttccgtttccggtggtgtccaatccgacctgaggagtcacagttgtgagcargttcggtgccgcgggctggggtaggcggcagtggggtccctggctttggggcactgggaagatcgcgagtgggaaggtcctcccgcggtcctccgggtcatctttcctcctgaggagcagcatatttcgcatctgccggaggtgtgcccgrggtcgttgggagagtgacgggatgaattgctgcagagagcccggacggggagggaaggtgtcggggagacgtcgtttcctggcgacgtggtcccggccggcgacttagacctgagccgaatctgttgaccccaaattgtgcttttcccaccaagaagaaaagggagagaaacattagtacaagttcggaactaaaatatagtagasaagcaacataacctcggaaatcacacagctgttcggtttcaaagcgttcctagtgcccagctctcctaactcccggccagtgttccttgacatatggtgatatataaagactttctgtttccgctcgtgtgtgtgtctgtgrgaagcctytgactcacttctgtgccccagtagcaccctgtgcagccttgcaatgtagcycttattgcatggcacggaagatactagtttggatttcctctgcaagtcagatcatagctatatccatttactggcacagtggctagcacatcatagacagacacaaacatttactaaacggaatgaatacaggaccttaattgaatgaaatggcaccctgccccgcttttttccaatcaagctgtcagattttatgcagctggatatccttaaaaaactcactaattcagtgattaccaatttattggccacagattcccaggtacctcagaaatcactggaagggtctctgtaagtccatggggtctccaggcatcatctagaactagtcatgtctcacacatacagatattgctatttttctttctttttttttttttttttttttttttttttttttttttttttgagacggagtctcgctctgtcgcccaggctggaatgcagtggcgcaatcttggctcgctgcaagctccgcctccggggttcacgccagtctcctgcctcagcctcccgagtagctgggactacaggcgcccgccactacgcccagctaattttttttttatatttttagtagagacggggtttcaccgtgttagccaggatggtctcgatctcctgacctcgtgatccacccgcctcggcctcccaaagtgctgggattacaggcgtgagccaccgtgcccggcctctagatattgctatttttcaaatgtatgtagaagagttgtaatttaggagttttgcagagtcaacaggtactaaaagtaatactgtgatcatgttggaagttcataaaagcattttaaattttttattaaaatttaagttttagtttaagttaggaaaccacttcattagtccagttgatatctaggtctgagctgtccagtatggtagccacatgtgactatttagagttggaataaaattaattaaaaattcattttttcagtttctctaagtacattttaagtaaccacatgtggctaatggctaaatggctgaaaagtacagatatagaatgtttccatccttgcagaaatggatactgctgatgttgacacttaagatgaataaaaagtaacttaaccataaaatgtacccttagcagaggtaactcatctaatttatagcataacagagataaatgaaattggggagggttaagcagtttctacccttgttcagtgaacaaatatatcatctcttcataaagaaataaataaaatttaatgtttttgccctgggtattgcctggattgtaaaatgcttctcccacctccttaccccaaccttcttccttgtagattagaattacttgttattggtaaatagccactatggagactaaggaccagaagaaacaaagaaagaaaaatagtggacccaaagctgcaaagaaaaagaagcggcatctgcaggatctccagctaggagacgaagaagatgcctggaagagaaatcccaaagcttttgcatttcagtctgctgtgtggatggctcgatcctttcacaggtatgtttagctacagtctgatgcttcttccattgattctttttaaatagtaggagcctctcacaggtgacatttggattcacaagtctagtccagctccaaaggacatggagatgcatgctgtgtggcttttaccaaaacatgagaggctttgctatagaagctgccttgcctccagcatctgcacactggttggtgtttcttgcccaagatacaagaatttatagaatttgtttcctcctaaactttaaactgtttctatggtgataagtgtgctttttccctctggatacgttttacaaagttgtaatataaaatacaaaaattacaatatttattactaacatagctttatttagtgagtccttgtgatattcttagcagtgtactttaaacgttattcaactaaatccttccagcagccttaccagagtaggaatcattcttgccctcattttatggacaagaaaactgaggtcaagaaaacaagttacctccaataatataaccagtaagtaggagagccaaatttaactccagagcctctgctcttatccattatgatgcactgccttggtatttaccttttggtttttaaaaaactattcaaatcacccataaaacagtcagatttaaggwgtgttcagttttcaactctatatactattgaagtcgtcttgttacatctttatccaacagcaattatttggatgggggtgagaagttaagttaataattgacaagttcattatatttatatattgtctgttgtactctataaaatatactaaagtactcatatctataagtatactaagaaaattctacttataaggttgatacctttttctctattttgaaagtgagtttacttttttcttttttttaatgaataggactcaggatttgaagacaaaaaagcatcatattccagtggttgatcgaactccactagagcccccaccaatagtggtagtggtgatggggcctccaaagttggaaagagcactttgatacaatgcctcattcggaacttcacccggcagaagttgaccragatcagaggccctgtgatgatcgtgtcaggtaggagatgctgccacagacacagagttggcgtggctattgtcatctgagggacatgcatgtgtttgttgctttcttgagtggaacatgttaaattttgtcatatcatgttacctctcttatacttttactaagttagctataacttcagaaaagggtaagttcccagagataaggatgtgatacatatcttatcctgagtgctctatggctttgccaagcatgttccttggaagggggtagcaggcctggtcactgtgaacatatcatttaacagacagcacgtacctcctatgtgccaggtgcatgcacatccttgcccttatgaagccacatgctagtggaagtgcgcgttttctctttttcctgtgagaatttgtctgctttgggagatggtgacctttccaagtttgaggaaagatgaaacaaacttccagtggtagaatgccaatgtacactcaagtctcttgttattgcaataatatagttggattgaggcttttctttatctttggagcatccatattttcttttttgagacagtcttactctgtggcacaggctggaatgcactggcgtgattacagctcactgtagcstcaaccacccaggctcaagcaatccgcctactttagcctcctgagtagtggatgccaccacgcctggctaatttttcttttttttttcctttcttttttgtttttgtagagatggggtttccccatgtggccaggctggtctcaaaactcctgggctcaagggatccacctgccttggcctcccaaggtgctgggactacaggcgtgagccactgtgccctgcccatattttcttgactgttttctttttaccttaatttagaaatgattatcgttatgaatattctgttggataatgtttgaggatgtttttagtgatagtgggaatatgggaagttttgatagaggcaaagacattggcctacagctgaacagcaggatcatggttatcatggagcctgtccagtcagaattttccctgtttaagcacttgtattcatctgggtagactttggatattatttaaatttagaacacagcaagaaaaacaggatggaatttattttattttaccggtaaatgtgaacttctcgtacactcctgtaaacgtatatggtgttttactggatacaggtaaaaaatgaaagttagagttgatgcttagagttttttcagggtctttttaaagtaaaattttcatcttttcacttataggtaaaaagctccgactcaccattattgaatgtgggtgtgacattaacatgatgattgatctggctgaagtagcagatctggtaagtgagcaggggcagcctggggtgctgatggagacttacagcattgtgataggttatttaccccgtgatgaagggaatagagttttatgattattaaaggaatcatggtcatcatcaaggatacaatagatgtgattgaattgatgataataataatagtaataaatgttgttatattaataatacaaatggaatgtgtacaataaaatgtattccaaaatctaaaagcaaatcacaggatagagaaaacctttaatgaacacagctaataagaactcattaacatgcatacatatatacctacaaatatatcatagtaagtaccatttcttcttggacccttcctggcactgtgctaactgctttctacaaatttagcttacataaacccttgwtacacccttgaggtgagtaggtattatctgtagtttacataagatgaaatagagcctcccagcagttaagtaacttgtgtgaagatgggacccttgttcctratggttctagaacctttatccttagtgataataagtaagtacatgaattgcctgaagaagtggtcagagtttatcatagaaaatctagatagtactcagtgtgtggaaaaatgtacacgctcttgcatttatggaaatgataatgttcactatttctgatattctattaactatcttttttttaaactatcttttaaattaactaaaataaaatacaaattaccaaaaaaaaaaaagaaagaaagaaaaaggccagacgcagtggctcatgcctgtaatcccagcactttaggaggctgaagtgggcagatcacctgaggttgggagtttgagaccagcctgaccaacatgcagaaaccccgtctctactaaaaatgcaaaattagctgggtgaggtggctcatgcctataacctcagctacttaggaggctgagacaggagaattgcttcaacccgggaggcggaggttgtggtgagtcgagatcccgccattgcactccagcctgggcaacaagagcgaaattccatctcaaaaaaaaaaaaaaaaaaaagcaaaaaataagccatattgattaggaagtgtrggatgacagataccttggttttttcatttttatttagttttttctagagctacagatttcatactttggcccaggaagactcctaaaatataaagtaaaaggtaatacagattttaaagtcgtgccattgtaatgtctgtaatgtcagaaaactaaataacattcaaattttgaacatgtaatgctactattagtaaaaataagtgttattaatgtaaagttgtgtaamgattactaaatcttgtatacttgaaatgattgaatagttcatagaagtcatttgtttctcttttatttaagatgtagcaagtttctaattttaaayacatattaagagatgcctttacttttttttakttttagttattatggatacataatagttgtacatatttatggggtacatgtagtattttgatagaagcatacaatgtgtgatgatcaaatsaaggtaattcagatgtccgtcacttcaaacatttatcatttrtttgtgttgggaacatttcaatttcattcttttagttctgaattatataataaattatagtcaccctattgtgctgttggacactagaatttattctaactgtatttttgtrcctgttaacctttccctctttttccctscctccctgctccccttcccagtctcttaaccatcattgagagagatgcctatgtaaatctttttaagattttcaaaaggagcacacacatttggtaaagcactctaactgtaatgcagggtatacacaatgcacattttctttttccttgctctaaggctggtctctcaggtccctgcagagcagtatccttccagatacatataaacacacatgccaccctttaaaaacacaaatggtagcttattttacacgctgttctatgctttgcttttttcatgtaatatatcttggaggtatataatcagtaagtactgtagctctgcctccttctttttaatataatattccattctgtggacgcaccataatttatttagcttagcttatgttgattgctctgctctgggttktcaaagcctcctgagtacagcaaaggcacaaacgatatgtggatttgggtgtgtacgtgtgtgtgtgtgtggattatgggagtaacactggcttagatgacaaagattggcagctgagggactgtttgctccctgttcttcctgatcctacaaccagctgcttgccccttggcactctgtggcatcagatgtggtgtgaggatattccacttattctttgagctgatccactgttgctggagagctctgcttgctgcctcrgtttccagaggcatctgtgctttcctacaagcccaacttcatatattctgtggtttcgggttttgaatgtttcctagtttaatcaaagatgggcatttctgtttccattttttgttagttttagttatccatggaaagataaaaacagaactatctttaatattaaaactagaagtttccaggaatcaattctgaaatttgcatctttgaagtgtcttaattttaaaaattggtcttatctgcttatattttcttatagactaccattcatcgtaatcttactgttttttgacttaattctaaactggtagctatttaaagaaattcctgagcaattgagttatacaaattaacatacaagatagaggtgtacactgcatacttcccagcaaaaaaagttttttttttgtgaggacattgaaagaagaggttggttttctgtacatattaaatatatttcattgattatcactttcttcccattctttggatgtcagagacctgttatttggcttaaaaatacattatagaaaacttcatttctttaaattaggatttcttaggtacgggcctggttagatccagccttttctgagttacttctcatgcattagaattcttaaaatggatgtttatatcctagtggccttgtcttatggttgccttttagagcaagtcagagggtggtggtttctctgggtgatgcctgtgtagtcatttgatttagtctggagtgggacttttctgtcgagggccagatagtagatattttcagctttgtggatcatatcttttgcagctacttagctctgcagttgtagtgcacaggcggccatagacgatatgtaaakgaattaatgtggctatgttccaataaaactttagttacaaacacaggtgatgggctggattgggtcgatgggccagttgccaacccctagtgtaggtggtctgttttggtagtttctttgagaaataatgtgttctgcttgtaggtactgatgcttatagatgccagctttgggtttgaaatggaaacgtttgagtttctaaacatctgtcaagtacatggctttcctaaaattatgggagttctcacccacctcgacttcttcaaacacaataagcaactgaagaagacaaagaagcgattaaaacacaggttctggacagaagtttacctggtaggaagagaaataattgttagamgctaacagtataatccttttaaamtagactgaagaggctgggcacagtggctcatgcctgtaatcccagcactttgggaggtagaggtgggtggatcgcttgaggccaggagtttcgagctcagggcaatgtggctaaaccccrtctctactaaagatgcaaaaattagtcatatgtggtggcgcgcacctgtaatcccagctactctggaggctgagacgtgagaattgcttgaagctgggaggcagagggtgcagtgagctgagattgcaccactgcacttcagcctgggtgacagagtgagactccgtctcaaacaaacaaacaaacagactgaagagacattactaaacgtctgtctaggatttgcctcctgaattccctttgcgtatgtgttcccagtctctggaaggtttccctcaagagtggttattctgggcctcttggtgtatctcatttgtctctgtacctgctgcaccaggcagtgtctgggtgtttgggggttgggacttaatggagtacgtcagaagtttctcccagttacaggaccaggcactgccccttcctttccatactgctctggtccatcagccacagaatcgtttctgtgctcagaggcctcacctccctctcctcaccatacttagayggatgcccctgctcggctgcagagcagtctgcctctgtgtggttctaataagtcctgaaagaagccagcaaggctctgcaagcctcaggacagtggctttgctggaagtctcccttcttaggattgcttcttgtttagagcttttattttgttgcagtattgacaagaatttagttgaaatttaatttttaattttcctttaatgtttaggttgccaagctgttctgcctttctggaatggtgcatggagaatatcaaaaccaagaaatgcacaatctgggccattttattacagttatgaagtttaggcctctcacatggcagacttctcatccttatatcctggcagacaggtaaaaagtgattgtaaacttttaattcctggaccatatatttcaaagctaaaaaggctagaaaaagaacagtgacaggatttattttgtgcctatttgaatagtgggggtagaagtgyagtggatggaaaatgtctactgatatcattgctcaaagatgctgtgcctttgggagtaaattaactatgagatgtttaggaaagtgggaggacttggaagcatttaaggccacaggatgtggccccatcctatgttcagcctcagatttcagtgatgctgccttcgtgcctgggtgcttgagtcctttgtgtgtgccttcagtttccttcctttgtgctgtggttttctcagcctggaataccctttttccacctgccagaatccaagccacagtacaaatcccagagcacaggctcaccctcttccagaaagggattttctgaatatgttctttactcttctctgaccccaggtggacgtcatctccctgtctggtgtcttacggaatgaatgtcactttcagcctagagacacagttgtgtgcctgccccttttcctctggtgcttccttatttctgtattttctagttttctaaacaatgtgcttagtggacaagagtgtgatgagtcactgacacatgaaaggaggtataggaacttttggcattcatttctgctgtatgattgagtttatttttctagggtggaagatttgacaaacccagaggatatccaaacaaacatcagatgtgaccagcagatgttactttacggttatttaagaggagcgcacttgaaaaataaaagccaaattcacatgccaggtattctcttgttgtagaacatactagaatcacacataggattcttgggatggcttcatttctcaggaaaartgaaaaatgaccaaacaagggaagatggccttggtggaggttttaaaagtaagccagctatgtgtaggcctgcaaaggtgttaccgaatgcctcttctctgacctcttgtcttgtagctagagggycactgttccagtgtggcacaatgcccttctttagggtcatggtttaakcccttggagtgtgcatcgtttttaaccccccagtcaacagtagatacttactgacttcttgtcagttgaagctggctttttgggtccygtcttccaggggtagaagattttgccatgagtgacatcrgtttcttcccagacccttgtgctcttactgaacaacaaaagaagtgctgtttaaataagaaggagcagctggtttatgygcctgtttttggagttgggggtgtgctgtatgacaaagacgctgtctatgttgaccttggtggcagccacggttttcaggcatcagtgaggcaggagtcattgctctgaactctcattattctttccgaatctatttyttaattaaaaaaagtaatatactcagcttttatttattgaagatttttctctcgtacttataatagaggcccaaatgcatattgtcaatatgtagaataaaaakaataccattttttcattgtaccaagcagaagagtcctgtcctccatgcctccttgatccrtggccccagcatgggcactgctgccagtgtggcacctgcccggcttatctcygtttctacaaaatcagtgtgctttccagctctcattggtctttttctttttctcattcacaatggtctcctcattrtttattttaaagtggatttccagtatttttagttctgaagtggaattttattgggttaaaatcagggttaytttaaaatgttagaaaagctagcattgttgtaggattggaactgagatttttctagcgaggtgtttaggttatcaggttgtatactcactgaggtttggamaagtttaatggagatggggatccatttcaagctttgttataaggattttcttctctggtttttgyggcattaagaaargwtctcaggaaatgtgtctaagataattttgagaactgrgtgaaaccagtgtctctccaggatctttgtgctttcctcacrtgccctttcttggtggtcttgacaggacgaggtggggcccacccatgagctggtccagagtctcatctccacccactccaccattgatgccaagatggcttcaagtcgagtgatgttgttttctgattccaagccacttgggtcagaggctatagataatcaagggtaagtctgctttttttctatttttaataaaaatatatattacagaagatyrtatcacccataattctgccatcataacacattttggtgggaytcattctatgttgttttgtttttctttgtgtgtgcatgtgtctctgagggctcttcacttacctgacattatgagggagtcttttcttgaaataaaatacaggatgcatttttcaagagaccccaaatattcctcaaataccacgccatcttccataggttgcttttttgttttttaagagacctgaggccacttggctttcttttggtggccraaacactagagcagaaacagggagtttgtggctgtccagaagccacatgccttgtctctgaaagttttatttagattatgttgtattatctcctatgggtaggtttccactgatgtgtggcttatgtgaattatttttcagcctttcttgggaatttgtatacctttatgcttagtggatgtttgcaaaacaytggttttgttgtattagtttatgactyccagtaaaatttatctgaaaatyttgagatartctagtatgtaatttgttacaatgtgcacaaactacgtactaaagttcctgacataatgagtgttattagctattttcatttttgcatatccttctggtcatccttgtctacaagaatactctcttctaatatagttacaggtaaaatacataatttatttctatattctgagcgttttgttttctatacagtctttaggtagttgtcattttgttgttcctggtgtttttttttgttactgtggtttttttgttttgttttgagataagatctcactttgtctcccaggctggagtgcagtggcgtgatcttggctcactgcagccttgaactcccaggctcaagtggatcctccctcttcagccccgcaagtagctgggactacaggagtgcaccaccacccccatctaatatttttttgttgttattctagggacgagttctcactatgttgcccaggctggcctcgaactcctgggctcaagcaatcctcctgcgttggcctcccaaagtcctgggattacaggtgtaagccactacggctggcctattattgctgtattctaacttattcatctcctatggtacgatttttcattttttctaatttatgttttcatacttttatatatcgtgctatgttaaatagcttcatatagttttcttttatgcagtgattttagcctcttgatgatcttctttatcagttatggcactggtgacttaaaatggatgttcttcctctgtcattcctccgacgtttgttagctggcatttttaacaaagagctttcacttctcctttttatttcggtatctctgctgactaatgcacttgcattttattccatgggttattttccatcactgtcattgttctttctgatgcctatgctgtcccagattcgaccgtgggagccttcagcctgtgtcctgtgtcctttcaactgtctctattaatctttgagcatttcttactttctcacagaacaaaagtatccaggcttatgttgccctctttctgccttgggcctggactcagccatttctcttaaggatcatcttaagcatcatttagcttagaaattaatcagctttccaaaagatgtacaaaatgctaactttccttttgagcaatttttttctaaaattagattttttttagaggattattcctttattctttctataagttcatttgaagtgtggtgttaggaaaccatgcctgagtttaactcttccagtgtttatcagatcattttttccctgtgctgtatcatcttaaacatcttaaacaattccttgacatttttatatttctttgtattttcattgactgtattgccatttctagattagctggttaatgtacaaattggattattttgcatttccttggtaatataggctgttgatgctaaaggaggaaaaacaaatggacttgaaaactggtcgaatgcatcggaaagccatttttggagatgattctatgctaacatcctctctcctttcttgatctcttaattttttttttcttacccaagtatatacaggttgattttgtctttctggaagatccaagatctttggtttagagatatattctcttaatgttaactggtattagaatactcttttctgtattttatttcratacacttgagaatagaaatgattgtattttcttttaacttgtgcagtagagtgtggcatacaaatgttgkattctcagtatttcaaaaaattaccttcttactgtrcaagttgtattcagcatataaagtctattccagctttgttgtagatgcagtgtgattattacatgccgataaggtatgaattggagatgggatccaaaattactgtacttagtgtaatttttaagctaattacagggttggtggtgaatattttacttctgcaaaatgaaaacagcatttcatcagaagttgttttatggtctttcagacattttattgtatatctttgrtgctttttgcccatgaagtatctcttttgtgtgtttgtgtgtatgtgtattgatctgctgtaaatttcacagcactcattgtcagggatcagcagaatcaggcctaggcagagagctgagcagtactctcagtacgtctctgtgtccttgttgccacattatctctgttgtttatttataagttggagaactctctgacctgtaacaaaggttggataggtcagagacaattgggagaggaatcctctgctctattgtcacctgtgcctcactccaaaatatgctctgaaatcaatatttaaatattaaatttgtatggtgaatgtattcttttttaatgttaattaaatgattggtcagcccacttaatatttacaatgcaggacttactttgcgtattctctgtcttgtatttttgctttatttaagctaggctagcctccaagctggaagctgaattgacagttgaaaaataatgacatgtatacaaggtatgtttgaaggattgcagatgcaggggcaccatatgctaaaggagtgttggaagctcactgcagaagatgacaaaagcagactgatatgtattatttgctgaaatataagctggaggcacaggtgaagattgccaaacctaatgaacagtttggcaaataagacaggctgtcaggccatggcagttcagcagtgggcgtgctgcctgtgaaccaagtcatttgttccagaggactacacttaaataccacaaataaaatcttccttgtcactgatatcacagtgaaatagatgttgtctttcagatttctggttgaattaccagccattaacatctggtgatttgggttgtaaaattatttttagttttgcctgttcatatttcatccagaaagcccaaacaagatatattttcccacataagaatgtaagcagtataatgccccgtccgggagggaggcggggggcagcccccacctggccagccgccccttccaggagggaggtggggggcgcctctgcccggctgccccgtctgggatgtggggggggcccctctgcccggccgccaccccgtctgggaggtgtacccagcagctcattgagaacgggccatgatgacgatggcggttttgtcgagtggaaggaggggaagtgtggggaaaggaaaaagaaatcagattgttgctgtgtctgtgtagaaagaagtagacatgggagactccattttgttctgtactaagaaaaattcttctgccttgggatgctgttaatctatggccttacccccaaccccttgctctctgaaacgtgctgtgtccactcagggttaagtggattaagggcggtgcaagatgtgctttgttaaacagatgcttgaaggcagcatgctccttgagagtcatcaccactccctaatctcaaatacccagggacacaaaaactgcggaaggccgcagggtcctctgcctaggaaaaccagagacccttgttcacatgtttatctgctgaccttccctccactattgtcctatgaccctgccaaatccccctctccgagaaacacccaagaatgatcaataaatactaaaaaaaaaaaaaaaaaaaaaaaagaacactgcaagaacatctgccccagaactgcctgtccaacctggactgacatcatccttgttattgatctttgtagccaaatataattattttaaaacaaacaaaaaagaagaatgtaagcagtataagactttaaaacacacaaatgaaaaatatacatgactacatgcttcagtgaactaaaactttcatctgtratctttattttgcaacgttctgaagtaacattacagtcttttcagtgtgctgtgtcatttatatcccttactttatcctgggaatcctgtattgccattgagcatatgcarattgagacatgtgcatagcttctccccgttgagcccatcagtggggaggagctatgtaccggggacatttggcaaagattttcaygagtctgttggatgtaacagctccttaagaaaacctcagtttaccttccctattttttaccatttgtaaaactaaggctcagtgatgtaaaatataacacattctgtrctgtggcataactgcagcttaggtttttatattcaagacaagcagaggtatagttgaaaaggtatgaacacttattatgcttcaagatccctttgttggtttagttgtggcattttagaacagcggacttgggactaaagcatctttctatctgggatcagtatttctaagttgcctttaagctgaataaacatttggtttttatatttarttgcttcgatgtgaaacactgcaatttaaaaaattacacatatgtaatayagtattttacactaaataatagtgactggcagtccaytggccgaagaagtattatttttcagatattctgctctgtcatcagctrtagacactgacmtggtatttatctggaaaggcttgctgtcaggggttcacagtgctgcttgtgggttatctccagaccctttacatayagcactttaggacagcgtgagtcacaggttgcactagaakttgcctttgaaattagacctaaactatgtggaactggaacccttgtacacaaagctctctatcatccaaatcctgctgaactstcttaggaaagaacagttttacagattcattctttccacacacaagatttccccactgcccagttactctcacctttttattttcttgactgttatgttttacttgackctggaatcttaccttgtactctcacatttacatggaagtatagcttatttcaccaattatactgtctatcaaaagcagaagtagttacttacacctgaaaatttgtactgagaatgtarctgtgaatatgtttaagaaagtatacttaaagcasaaatccaaggaagtatatttaaatcaaagcaagaaatcccatttccaaatggcaataaagcatgtgttacatagaatcagtgcatgaaagtgttttagtagcccagattagattgtaccctggcraataagcaagagttctttttcattttcatcttgcaattcaactgggtatttgggttctttttctattcactcatgtcagatagagacatrcatgttgtaaattattttgtcagaatgaaagcctggcagattaaatgctttcttctcttcttgctttacttgatatcaatctcttgttcatttcttgataatatgtttggttatttttgttttcattgcttttagtgtcagagatggctttggattccccrttctgtgtgctgttgtctggctcctgaacccasctgtagaggtgtgtcaatcccarctggtgaagtactgagaggaagctacacaaaaggcakcaaagtattagtaagtgtacctctgacattttaaccacctctgacttttccatggaatggacaagtagtagtctctgtcagagctacattttaaaggagaaaaagaaacgtgaagtcatgaactyyyaatttatgctgttatttttgtgtttactcacctcatttatattgacttgtaaattagtaatttgtgaactattayttatcaattcattgcctacatgtcaggaaacaaattttcttcttaataaagaatmcggttgctgggcacaatggttcacacctgtaatctcagcacgtttggagggcaaggcaggaggattccttgaggcyaggagttcaagaccartctgggsaatatagcaagatttcatctctacaawaaaatgaaaayattggctgggcatrgtggctcattcctatagttcaggctactgaggagcctgatgtaggaggatcatgtgaccccagtagtttgaggctgcagtgagctatgatcctaacactsctctccagcctgggtgacacaccaagttgccctctcttcaaaaaaggaatctagagacatcagtgtgtgcacaagcatggtttgtgaatttggaagtgcgtatgtgcrtagttktgctcaagaatgtgttgatgattataccttctcagaatgaaggtaattttttttctttttttttttttgagatggagtcttgctctgttgccaggctggagtgcagtggtgctctcagctcactgcaacctttgcctcccgggttcaagcaattctcctgcctcagcctcccaagtagctgggactacaggcacacaccaccactcccggctaattttttgtgttttagtagagatggggttttaccatgttggccaggatggtctcgatcccccgaccttgtgatccatccaccttggcctcccaaagtgttgggattacaggtgtgagccaccgtgcctggcctgaaggtcatttttataaagatctctccatgtcttagatttgattcttcctttgaatatttttctcattgacatttgaaagcacctgaccttatataaaatgaacaaytttcataactccataaaaggagaattatggcatcatctactatttctttctcttgtctcataaatctaaaccatcaacctgcttatttttgtatactgtcacactgtgtattccctgcattgaatgcmtttctattgacattrtctrtaaaaattgtgggaagttktctgcaccctgaaatttctgttatgsggattaratatccastatccgtgtttttccgagtcttacagcagaaagggtaaatrcagccctcacagcagcctgttgttygtcctgcarwtgtgtttccatcacattacacaaagcctctttgtcttcrtggttstaccctrctaataagtttttwwaaaaattatgtaatrtgtgtatatacaaatacctatatgtttgtgtgtacacatacagctaatatctrctgagattatgtatgcatgaactatagaattaacttgyaattttaagaaaataaattattttgtaaagataaatctcatgtttaagaagrggaattacarttgaatcatttagggatgcctcarcctaarcataatatggaaaaagccataaccaaaagtcattttagagtactgctaggttrctcaacctatcatcacatttaattaaaatgtcagtttgaaccatggccagtctattttggttaatatgttatttaaatcaacttgtgaagtcttcattttaaatatagaatttgtgttaatgaactggaaaataacattctattcttggaagatgtgttaaagtctaaagatttatgactttgtaaaagaagaaaaccagctggtgatcagttggcattagtatatgaggatgtactcatatttggtaatagccatttttttctaactagagyaagggagttgggaatgggaggcagaaacaaggacacagacatgtaaaaaatcatagaacaaaactgtattgagttctgcgtatgggtctgtgatccatggttcagtttgagaggttcatgtgtcccttatgagaagggacaggaaagccaggaggacaggagtatgtttgggcctgtgyctstgcttccrccacaraagtcagcagctctacctttctcttttctcctctttatctaataattgtctcctcttcaaatttgggaaatgaacttaatcaaakatttgttgtgtttttttgtttgtttgttttcgaaatgtggcctcagtgtgtttgcccaggctgatcttaaactcctgggctcacatgatcctccctctcagcctcctgagtagctgggactacaggcatgtgccactacacccagctaagttaatgctaatgtgtagtttatctgcttcaattttgaagggtaggatatatatagttatgtgtgtgtgtgtgtgtktgtgtgtgtgtggtgggggggtagtgtttgtgtgtgtgtgtatrtatatttatatattcctagtccattgctgctacaacaaactaccactatgtcagggcataaaacaaatttattacactcctgtaggtcagagtatgatgtggatctcactgggctaaaatctaggtggtggaaaggctaccttcatctctagaggttctaggggatcttttttctcgccttttccacattctggagtctgcctgcattttttggcwttgggctcttctccactgtcaccattagcaaccttgcatcccatggacytgtcttctatggccacatgtctctgtggctctttccttcccccttctcttccactgttaaggactcatgtgcttacttagtcctgaatggasacaccgtcatcatccacatagcccactgtcgkaatccrtacaggctgctacaaggaaatgcattagaccrggtagcttataaacaatagaacttygtttctcacagtcctggaggctgagaartgcaagatcaaggtgcyggcagtcttggtgtctggtgaaggcctgctttctcatagaggcttcctycttgctgtgtcttcacatgkggagaggaacaaacaagctcccttgtgcctktaataaggtrctaatcccagtcatgagggcagagtctcatgtaaggcttaacctcctaatacatcaccttgagggttaggattttaacacatgaacaktgayggaacacaacrttcaytccatagcaccagggtagtctcctcatgtgaaggtctttacctgagtcacatgcatgatgtaccattttcatgtaaggttctaggaatctgtggacatctttggggggcgccgttattttgctgatcacatattacatatwttttaatattctagactagtatgaaaacaatgcyacttycattgctttatatatgyatmtatatatatacacattgtctaatgctataattaaaaaaaagttgtagacacaaatatacccatttaaaaaaaaacccattttttkctattttacttyatactgccaactcctttttcctgaaactgcttcaactctggaattcttttttgctgttagttttattttattgaaatattcatgaacgagcatacacttgtatatggatktaaaattcacagtaaagttctcatgaattcatctgtgaataacattttatagacaaaatgtctgcactaggacaagagaaagatgtataattmccttgttctaaggtaccgccattcattgttattattttaaaatacgagtgttgactgatgttaaaacacaaaatggggccgggagtggtggctcccgcctgtaatcccaacactttgggagatcgaggtgggtggatcacctgaggtcaggagtttgagaccagcytggccaacatggtgaaaccccgtctctactaaaaatacaaaaattagctgggcatgtgttgcacgcccgtaatcttagctacccgggaaactgagtcaggagaattgctggaacctgggaggcggaggctgcagtgagccgagatcacaccagtgcactccagcctgggtgacagagcgagactctgttcttcccccchccccccaaaaaaaaaaaaaaaacacagaaagggataattggcygggcacagtggctcacgcctgtaatcccagcactttgggaggccaaggtggacagatcacctgagaccgggagttcaagaccagcctgaccaacatggagaaaccctgcctctactaaaaatgcaaaaattagcctggcatggtggcacatgcctgtaatcccagcttctcaggaggctgaggcaggagaattgcttgactctgggaggtggaggttgctgtgaaccaagattgcaccattgcactccagcctgggcaacaacagcaaaactctgtctcaaaaaaaaaaaaaaaaaaaaaaraaagatttataactgggcagtggaattgaaaatsatttttaaaaatatccaaaatacctaaggaacttgtataaataaataggaaaaaaraaagagaaaaacgtcaagaagcccacaaaaaagcagatttgtaaatgggcaatggattygaatagacatttagccamagaagacatccagttggtgaaaaggcatatggaaaggtgctyagcatcactgattatcaggaaaatgaaaatcaaaaccaccacaagtgctttagaccatagcggcatgcatgaaagttttcaggcctccagttgttgggagtggctgaggagattggggagcttctgtctgagctggaagagtggagtctcaacaagaaccagygtattctggacatgtgtgggccctggagtgtgcatggctggatgccttgtctacctgtgccttacagagtgacaccattgtggtgtggtcgatcagagggccaagtggctttcagagggagtgggaagtggtgggggttggtttgtttgcccatggatgaaagcaaaagtgagttggcttcycaagaacttttcccagtagcctgttttgctacaattctagacccagactggggtcccaaggcatgatagcccacagcttcttagcaagtgcatgttcagttggatcccccagctcagcctgggtcatccccacrttytgcctcttgggccatagctcagctctgcacactgagccatcatcctatggtgagcaagaccccattcttgggcttcagtctctttccttgyagcaggcaatcaaggtggtggctggaaagggccaaggagccacatctcacagtgccctgctgcctgaacaaggaccagaggcctgtggaacacatggctctcagatttctcccatttgatgactcatcagctgcccccacatggctttctagctcacagcagatctagccttctctgagcagtgaagatgggatgttttgtggtccttttccctggtgygsagagcycaagtggagttcttcagcacaycctagwccatcccctcactaacacscccacctgtccagtcttacctgccttcatatcaaaagcacwcagttaacccagagggcttctgccctgccctgcctgactttctgggaarcccccctctccacccaccctaatcaggacactgtctgaaggttccccctcatcattttaaaaggaagagaaattttctgccacagaggttctggtgaagtggcytgctcccacatcacagggtgatggyggtttgggctggaccaggatcagacagtgctgtcctgaggctggccgtctgataaggggctccagaaagggcagtggtggagccctgggaggctttctgctctcctgatcrcaggtttttggtgagaggacctattggccactagggtgtctgkgtgtrtgygtgtgtgtgtgtgtgtgtgtgtgtgtgtgwwatgtgtgtttacttggartgacttctttcagcatgaagcccactgttttgctgaaygtatctcactgtttcctgaaactcagtacattcagctggcttaagggtcctggggcctcgctgcgtcatatttgcacaagcctagtgtctgtgcagactgtacactggagttcagttgtaagacccttttgawcccttattctgttcctgtaatagaaaagccatttcactcaatggaatagaaacccagatccgatggagagatrttctaatctgccatacactggggcagtggcyagtgatttggacttkgtggcatagatggaaatttccaggttgtctaggtggtagacagaggcctcacttcttaacaaactcccccactccacccctgccaatgargatrttgcttagaggtatttctatcagtgttgagtagaagagatcatttcttgatgttgaacttcaggtaaggatgccagcttctgcrtatcagggtgrtgatgcttgggctgagacaggtctagacagcactgtctgaaagggggctcaaggaagtagctgtgaaaggcccctgggatgttttctgctcccctttctgcaaattccctggagggagatcctgttagtcactacrgggtgtgtgtgtgggtgtgtgtgtgtgtgtgtgtgtgtgtgtgtgtgttcatcacttgttgcttgggkgtgggaagagacaacaaaagcctacagaatctakagttctcagttcatctcccatcctagtccaatcatggcctaacatccttagctactgatcgcagaggagactcygcgcatttgtgttcatgtggccttggatgttggcagattcagattggtgccccagrcatctgtgcctgtaactgcagtttcagcgggctcaggaccaggctgaagggcctccaagcttcctccagtttcctggtgcatgcatgtgcaatatrctcccctggccttggtctttcctaaygcttcttgccagttgggtcagaactagcttattaaccagttttttctgagctttaatcgaactggctccaaccagttggagacttgaaaagggctacgtgmtagttatagatttttaaagatatattattattttagagtagtwttgagtgyacagcaaaatggagtrcagrgtccagagatctcatatgscctcrattcctgtayactctcrggtcactccaccaayaacctcctacaccagagccactttgaaacattagaaaatatayttgagcattcagaaatgtataaactaggcagctccagactgcaagcagctcagagttccaacagagaggcttagggagggtgggggaagaattttatatggtgaatgtggaagaaaaaatacttgattgggtraagtggagcagtggcctcatttggaacattacagtggaaagtctctagttagatattagttggtggtttctgactggttaagcttaartttccttttattatttacactgagtcaagttttggtttatttaaggaggaattgagtgcactgcagccacctcagcctcatggccacctgtttattkgattatttttaaaagagaagagcctttwaaaaatatctgttgccstggctggagtgcagtgacgtgatcatggctcactgcagccacaaccttccagctyaggtgatcctcccacctcagtgctccccaccctgagtagctgggactayaagcatgtgccagcacaccaccatgctaggctaatggtttgtatttgtttgagagatgcagtttccctaagttgcttaggcttcttttgaactcttagactcaaataatctgcctgcattggcctccccaagtgctggaattacaggccatctaaatcttttatctcagrtttgccttgtgrcaaatggwggggtactttttctgacatgatgaggcagagaaagrtgaggtgggcgcatcctgtgcatatgattttctcaggtgatgggaatatggtsggctcttgcctaatgggatatattttctctttgaatgatttggcaagatatcagatgagagaarttgaataaatgttagaagaacatagaaaaaayaggttatacacrttgggtttctgaagaaatgatgtstttggagaaacaaaacttttattgatttctggaaacatttagggccaattttttatgtaaataatttgaatttatgatgatatctctgaccactttttgatwtttttttctggttcaggtgagtrgtgtcattgagcaaacacgaagtcgggctcatccaaggatgagattttgccagagaaaggaygagcagcaagtcagggagcttaaggtaattatgggaaagtgactatctacaattgcttaggtagaaggagacagattggatttttgtgtgtttggtatttgggataagagggatgtgggtgtgtacttgasatgggttgttctctctctctctttttttttttttttttttgagagggagtctcactctgtcacccaggctggagttctgtggcacagtcttggctcactgcaacctccgcctgccgggttcaagggattctcctgcctcagcctcccaagtagctggggttacaggtgcctgccaccacgccctgctaatttttgtgattttttttttagtagagacgaggtttcactatgtaggcaaagctggtctcgaactcctgacctcagatgatccacccgcctcagcctcccaaagtgctgggattacaggcgtgagccaccgcacctggcctgtttattctcttaagagagaaaatgaggggattartggactgtagttctggacaaggtggaaaactcttaaagtggaagtaytggggcaagtgctctgacaggstaggatggtgcagtcagtcmcttcacccagaaatcagtagaatgttarcagttcagactcaaaccttgtgaaaaacaggtkgtggaaaggaaatccctcacagcaactggcaccataatcaagacagaatktttrcagratwaatrgagttacctgctttcagccccaggttrtagctattstctgccctgatgatatgtgataataatttgtgatcmtattgtcttaaaatggggtcactcatctccagtagaattaagtccacagtgaagttgtccccccatccccaaagagataaacatatatgaatgaactyacatgataacaactactgctgcctgggatcatgagagacctgaactgaactgataggawgtgaaaggtggctgagataatgagaatagacccatctgcagaggatcataaaaccagcaaagacaagatcttgtctaagatgccttcacaarctttgtccatgagaactstaaggwyttcwccagacctgttggctgctgctgtgatctctgcccaagaggagcytctgaccaacatccaaagggcttctggacccactggactcctctggaggtaccttrgtctcccgatccatggctgtgkttttttactccstttatcrctgcctgtgtgtagaatgataattgcacaattgatagtgtgaagacctcttgataaatggtraatctgagcatatgtatttggctgacatgtcattgtgaaacctcacagcttcagtcagtgtcagcacagctagggagcatgtacctaatgcacatatcactgggcatagtctacaggcacctaataacycaggtaccttaacagtcactaatgmgtgtctctccaaggtcwaaacaatggaagactgtagaagatgctattcattaagatatckcaagaatrtggaagactattattcgcttctcatgggacaggactttatagggcacctgaaaaaactcccatgaaaaatcacttttacaaaatgtcaagttatgatatccaagatgaaaccaatgagtcacaacattcacataatacactgtacaaccctgatctcttgactgtcatcaaatgtttcttacctctaaaccaaagtttcattttataatttaatttttctcattttttctgttctcttagcttaagaaaagatcattacaaactttttgtatgtttttcatatatgcttgcaaagggtygtaaaactttattgtgattattcttgctttaagctgaaacwtccctaatctttctttagagattgtggcatagcatgwtagtttcttttccatatccaattgttktctgtwatgaatacagaaatatrggcactrtyttgtaactttaaatagacatcatctcaagtctacaagaattatccaaaayggtatttaatgacatttctaggtcttcagacactattaatgtagattgtascctctaggtcctgaggatttttactggatactggttactgaaactgagctttcttgaattctttttccttccactgtggtttcccgcatttcaacacatcacctatttttgtcctcaaacgttacttaaatkttttccacagaattaaattaaatatgaatcatccctcctctgatttttgaaatgaccctttgcttcctatgataatgattcttctggtccrttttgtagttatatgttagagtttgtaaatattcacacattttgcaactgcatrtaattttctcattttttcctcttcctctaaagctgctgttatttcttttaactttttgtgggaaaaattaaacccatctttcactttgttgatatrtataattgaactccttgatttttgcttgaattgcttttcaagttacccacttttagggaagacattatttgggttttgtttagtgtatcaggctttttttagttagttgtatcaagaagtgtagacttttctatacataatatcctttttcccacagtagttttttttttttaaagtctagccgggtgcagtggctcacgcctgtaatcccagactttgggaggccgaggtgggcagatcacgaagtcargagaccgagaacatcctggctaacacagtgaaaccccgtctctactaaaaatacaaaaaattagccggacatggtaacgggtgcctgtrgtcccagctaatcaggaggctgaggcaggagaatgacatgaacycaggaggcagaggttgcagtgagccgagatcgtgccactgcactccagcctgggtgacagagcaagactccatctcaaaaaaaaaaaaaaaaaaaaagtmtgttaaaataaaggtcatcaaaagatcttttcctaaacctttcctttaccagaaatatctctagagtcacatggtcctttctcccttcttgcttttgtaggagtccaaagctaatctgtccctgatccrgattgcatgcacctgtgccttttggggcccttctgcattagttcttccttctcttctaacctcaaaaatgtgttttytctgttggctctttccctttaacatagaagtatactcacgcttttgttgaatcttggaataaaagtcttcctttaccacatatctccctttaatactacatctctcttctcagccaaatacttgggaagacaagccctgagtttgtgtgattgttttctcacctccagttcactactttgaacaggcactgtgctaggtgctgctgttatagatatgaaaagaaggcatcatctcctttctaacaactcataggagcagccattcctgattcatacgcaggtctcttgattctcagtgctcacttttgcaagcttcacttaatgccgtgtaaatcaccctattctccaggtcttctttcttcccagttctccttactatacacaacttctcaaggcagtcacctccacgcccatggcttcaattgctttctccattctctgagaacaatagaattttaaatgtttttttttcatgtattagttttattttatacagggtgtctcacttgctgtaaccatagattcaaagttgctccatgaaactaataaatgaaaaatggtgattttttagcatgtaaattttaggaaatttccccagttacacttaatggcttgatttagtatgttatttttgaaaacatatgttgggatgtcacaaatggacttagcctacagagatttatattcaacttttgaccagagagttccattttaatgtgacactgagagtaaaaaactatcttttcctccttacctatttctcttcctacattctcggccaggaggaaggcactgctacayacccagtcttccccagcagagcctgagcagctctgttttccttctacttcccctcttctttcacatctcatgaccaagcacttcctattctgtctcccaaatgatcayagattttttcctccacttttgtcactgccactgcccttagcattactctgcctttagagaaagtctcttaattggtttggttgcttccttcagtccttattrtacagaccactacacacacatctgacagagacttttcacctttttatggttcaatgactgaaattcccagaataaaattaaaaccaccccagcatcaaatttgaggtcaaatagaggtggatttgtatcccaggttcatatactatccagcagtatggtctcagaaaactgacctccttaagcctttgtttgtgtatctgcctacactcattgagagttgggactatttcacacatacagtgcctggcatgtagaagggacttaatcaatgttgaaagaaggggaggcattttaaaatccacatcaaaaaaatgttgttctgttygggagtggtggctcatgcctgcaatcccagcactttgggaggccaaggcaggtggatcacctgaggtcaggagttcgagatcaacctgagcaacatggtgaaaccccatctctactaaaaatacaaacattagctgagcatgggggcgggatcctgtaatctcagctacttgggaggcttaggcacttgaatgagaatcacttggacccaggaggtggaggttgcagtgggcaatgattgtgccactgcctgggcaacagagtgagactctgtctcaaaaaaaaaaaaaaaaaagtaaaaaaaattcttttaaaaatatacgaatctggctgggcacggtggctcatgcctgtagtcctagcactttgggaggctgaggyaggcctgaccaacatggagaaaccccgtctctactaaaaatacaaaattagccgggcatggtgacgcatgcctgcaatcccagctacttgggaggctgacgcaggagaatcgcttgagcccgggaggcggaggttgcagtgagccaagatcacgccattgcactccagcctgggcaacaggagcgaaactccgtctcaaaaaaaaaaaaaaaaaaaatagtgttcagcaaggttgaagcataaaacgttaatagccagaatcatttatcaattgtatttctatacatctacaagacacaatctgaaaatgaaattagagaaacaatttcactgggcaacaagagcaaaacttcatctcaaaataataataataataataataatctacaatgtcatttcccatccaagcttgacttctacctttactttctgatgtggttttgccatgtccccacccaaatctcatcatgaattataatccccataatcctgatgtgttgagggaggggcctagggggaggtgatcagatcacgggggcagttatcctcatgctgttcttgtgatattcagtaagtcctcatgagatcttatagggttttgttttgttttgttttytaggatggagkcytgctctgttgtccaggcaggagtgccatggcacgatcttggctcactgcagtctctgcctcttgagttccagtaattctcctgcctcagcctcctgagtagctgggattacaggcatgcaccaccacacccagctaatttttgtatttttagtagagacaggatttcactacattagctaggctggtctcaaactcctgacctcagttgatccacctgccttggcctcccaaagtactagggttacaagtgtgagccaccatgcccagctgagatctgatggttttatacatgtttgacagttgctccttcacatgttgccactctctgtgcggccaccatgtaagtcggacctgcccttctgccatgattgtaagtttcctgaggcctccccagccatgtgaaactgagtcaattaaacctcttccctttaaaaattacccaacctcaggtrtttctttatatcagtgtgaaaacagattgctatactttctgataatcatgcttaagcaattggggaattcagactacctgggatcaaaccagggccccacccttagcagtcatgtgaccttggggaggttacttaccttctccgtctcaacaacttctgtaaaatctgtaacatgagattgtttctgagggttaaatgagcatagcacagtggggacactgtcaggcacacactacttgccagatgtcaagtattcatctttattgaaataggactgtggtaagccactttatggctctcgattktgtatgagaaaatcatgyttagtgccttgttagtaaaagaaagaaaatctgaaagtccctgccatggaaggaagaaatagcggggagaaaagggagttggtaagtttcagcatttcagagcttggagggacaagttaggtttctattttatggagaaggaggtggaggcaggatgggtcctaaggtgtcattcaaaacacacagccataactctttattgagagtagagctagggccgcagggattgctgtggtcacgttgcggacaaaaatgaccactcgttggaagacaggagaggagtgtttatcaaagcagtcaacaattcaggtgtatctatattcagtcagcaaataaaagttgttcaacttggttgctaatgggacccactctactgaggctttgtatagaactcatagaggaagatggcttcaagcaatgaactaccctgtgctttcttaggactaaaatctcaggaagttggtgatgaatgaaaaccttagtcccactggcactgcacgaggggccaggagagcagcagcatcataagccacagggtggggcagccaaggcaggggcattctgagctgttggggaggggtggcaggcagggtggggcactgtgaggtgtcggggagggcattgtgaagtgtggggtggggcattctgtgccacatgcctgggctcccacctggggccagtgggcttcagtctgtaggtgactacagaaggaggaggagctccgtctgttctctcttcaggcagttgttgtgtctctcagcgcttgttgggttcacaacctattaaataagccagctggtcttcaccctcccagacaagtcaactcaggggaggcagcagggtgtgggccttgacccgcagccctagccggggccggggccggggccagggatggtgcccggggccgcgctgtgaggtgggcaggcgaggagcgggaagaccatctctgcaagtgcagcatagcctcggcctaggacagtgggagtgtgtggccaaagctgtgagcagaggcacaggtggtggcagacagtagaggcgccccatggggaacatactgacctgttgtgtgcaccctagcgtcagcctcgagtttgaccagcaacaggggtcggtgtgtccctctgaatctgagatctatgaggcaggagctggggacaggatggcaggagcgcccatggctgctgctgtgcagcctgctgaggtgaccgttgaagttggtgaggacctccacatgcaccacattcgtgaccaggagatgcctgaaggtaaggaggtgataggtgccatctaccctcggtttgcctctggctgctgctgtccccaaggttccctttacggcatcccccactttgagctcctttctgcttgtagccagctttcccgggggctggccaggaacaaaagctggctctgccttgaattcccaccccttagtctttcctcaccgagtccagtcagtttcttttcgcctcccctcccaatcgcccagttcttgctctctcatctcattctcccaggctggcatgggaccatttatttatggctcttgtcgaataagcagcagttgaataaatgagttgataaatttttataaatgattacatcttttttcttttctccctctatacatatagctttggagtttaacctttctgccaatccagaggcaagcacaatattccagaggaactctcaaacagatggtgagacaacagtgtctgtagctctgtttattatcctgtgggactttgtttaggcttctttgagctattctcttccttttctcaataaaaactcaaatatcccaacttttcagtacccatcttattttttctttgtacctatccagatggtacctaagtgaaggaaccaggtaagtgcctaattgtttcctttgttaaagtagccaaatctcaggacagttcctattcaaatatttggggatttcttatttaaaatcagaatggaggttgccacgggagaggctatatggtattcttaatgggctgctttaagtcaccttgatagaagctgcttagtttcttctaactgtaatttgaacacagaaggaaaaagaaaaaaggagagtgcttaaaataattgtgaaaggtgtgaaatgtcacagccggggctgcagaaaaatggttgtgtgtgtgtgtttggggtttctcaaaggagtttacctatgaggctctgattactttaaaattcttactttaacagaaaatgtgtctccagatttatgctggtgacttaacagactttatttacctccttgttctaaaagagaggtggggattggttcatggtcaaaactttcaaaagacatgaaatgtcaatgtagacttttaatgtgtaatataaagattgcaggttaaaatgtcagaccttccctgtaagagtgtttgttgccgtggctccccctttgtcccttcccctcctgacaatagcatcttgttcaaagataagaaagttacagttttggctgggcttggtggctcacgcctgtaatcccagcactttgggaggccgtggcaggcagatcacctgaggtcaggagttcgagaccagcctggccaacatggtgaaacgctgtctctactaaaaaaaaaatacaaaaattagctgggtgtagtggcgcatgactgtagttccacctactcacaaggctgaggcaggagaattgcctggacctgggaggtggaggttgcagtgagcagagatcacgccaatgcactccagcctgggtgacagagcgagactccgtctcacaaaaaaaaaaaaggaaagaaagttggagttttttagtctctacactgctggcagaggcaggggatgggagctggtagaaaagagaaaacaattagttggtttgcctctaaaattttgcaaagagatgaatctaagtaaaagtaattctgggtaataatatggttcttgaataaaaactgaaattttcaaaatagaaaacattgcatcataaacatattaaatccagttggcttattggtttcatttaaatgccagagatttcattactgtagaggaaatgtcttatagctcttctatttaaactttggttgggctcttaatttttaaagaggtaggataattaagactcattatgagtgtgactttgtaacttggaagtactatcttcacatttcaagatatttaaggattgctttagaataaacaaatgtattatgtgaattaattgattgtacctttatacacaaagcacataagtacttgtgtaaacttatactctgcttggtgatgttaggaaagcctgatggatgttacacaccagttagtagatgggtagtgttggatgagagcccaaaaatggctctttattggcattctttaggattacaacacagtttatgtaggtctcacttggccctttccaatacaaataagggcctgtgtatgttctccctatgtattgctaatgaagaaatgaaaacttagagatatcacatgactatggaagacagctactcaagagaactaaggttctgtgtcctcagaatgaaatggaagtgacagatatgatgaatttactttttaaaaattttaaaaactctagaatacatcttatattttgcctgtaaaatagacctgtcttttaaaacttactgccatcttgatttattttatgcaaagttgattttacacaactcaaagccaaaatttacctcttcattttttttttttttttaaataaaggagggtgtcattgtgttactcgtgctggcctcaacttcctgacctgggttcaagtgattttcccatctcagcctcctgagtagctgggactacaagcatgtgccatcttgcctggctctatcttatgtctatacattcatttcaatgkataagaatcaaagtagagatagtgaaatagcctaaatgcagcagttgaataaacgagttgataaatttttatcaatgattrcatctytttttcttttcttcctctatgcatatagctttggagtttaacccttctgccaatccagaggcaagcacaatattccagaggaactctcaaacagatggtgagacaacattgttttttccgccaagagaaagaataaaagctcttgtttgatcaggttatagaaagtatttagaaaaactcatattggtttaaatttttcaccytttcacatgttcacttgtcttattttaatatgtgatatactttcctttagttgttatgatgttagtgaaaacgtgtaacctttttgtttatacattttgccatctttttatcaacacaattaatttgtcatgtgatggaggagtcatggatttctctttataatttttggatttatctttatttataattaatggatttatctttatttataatcccttttcccttgctccaaaaagtacactttaaagatgaatgatagaacttaggcttcagcttggttttcatttaaacaaattaaaaaacatagttgtttatcatcagggattgaatctgtgatttgggcctcctcttacgcagacctctgaccacattcatttaccacatccaagtttatgctactcaaaagttttaggttattaactttttcatttgatgtaatgtaaatttaaacatgccctactcctgcttatttcccttaatgttatgttaaatcctcatttatttgccaacaagccatacacagccaagttttccagttgacttaaacagcaagaatacaagtgagggttctataataatatgcgaagtaatgcagcacagtaaaacacgggagtttgtaacctttgtttttatagtttgagtagactttgcccatcttgagtcagttatttctggttagaatttgtcttcattttttacattactataaagagatacctaaggctgggtaatttataacaaaaagaggtttaattggctcaaagattttcaggctgtacaaacatggctttaacacctacttctggtgagggcctcagcaaacttacaatcatgataaaaggcaaaggggaagcaggtggttccacacagtgaaagagggaggagagaggggaagggggaaggtaccacactctttttttttttttttttgaaatggagtctcactctgttgcccaggctggagtgcagtggcatgatcttggctcactacaacctccatctcccaggttcaagcaattctcctgcctcagcctcccgagtagttgggactataggtgggcacaataacacctggctaatttctgtatttttggtagagacagggtttcaccatgttggccaggctggtctgaaactcctgacctcaagtgatctacccgcttcagcctcccaaagtgctagcattacaggcttcagccaccgcacctggccagtaccacagtcttttaaattaccataataagaatttgctttttaccatggggatgggaccaagccattcataaggaatccactgccattacccaaacacctcccactaggccctatctccaacattaagggtcacatgttaacatgagacttggaggggcaacatatccaaaacatatgagaattgtatttcccagttccttccggagccatgggcttctcacacctagagagcatggaagcagtaaaagaaaagctattccatgtccctcactcttcagtggtaggaacttttgcctacaaggcccttccagcatcaaaggcagaggcagtgtgggaaacaaagcatggcccaagtccctcttggggcttttattattctggcctctttttagggaaaaaaaatgattttttgtgctgcagacaccatgtccaattaggtttgtatactcattttaacatcaaaatttaggccaggctctgtggcttacacctgtaatcccagctctttgggaggctgaggtgggtggatcacgaggttaggagatcaagaccatcctggctaacacagtgtaaccctgtctctactaaaaatacaaaaaaaaattagctaggcatggtggcacgtgcctgtagtcccagctagtcaggaggctaaggctgaagaattgcttgaacctaggaggcagaggttgcagtgagctgagatcccgccactgcactcgagcctaggtgacagagtgagactctatctcaaaaaaaaaaaaaaaaaaaaaaaaaatttaagataggttactttccagttgtgtaaagaccgttttttaattttgttttgtttttagtgacatattagtagataaccactaagtgtggttcaagatgcttacagggattatgttgcatctagagataggtgtctggtcaggaagtagttgttagagttgttagctcttagagtctgataattaaagtaagctatgtgtaaatgcagaattagagaatactaatggatcatggctcatatatgcaacagttaaactttttattagctaaatttttcatctggcctaatttttttgcccttttcttttgtacatgaggattctttcatttgtatgtaatagaaacaaaaagtaaactaaatgaaaaactaagtttttagatttgacttatgaaattaatcatgccagataatttaaattataaattattgaaaattatttttttaaatggaattttgtctcattttacataggagtaatcagtaagatgttaacaactacttttattttatggtatttgtatcagaagtgaccagtttttttttttttattcttagttgtagaaataagaagaagcaactgtacaaaccatgtaagtaaacactcaaatagttaagaaattgatagtttgacataaaaggatgtctctcttgatttctttaaattacaatgtggacctggtggtggtagcatggacctctttttgtggattttctaaatctcttctattttcctgagtattaaatttatccagaaaagtgtttagcttagcgtgtccaccttttaaagatttctgacatttaagttaaatttcaatagtctggttcaaaagatctgccttaaggctgggcatggtggctaacgtctataatcacagcactttaggaggccgaggcaggctgatcatctgaggtcaggagtttgagacgaccctgaccaacatggtgaaattctgtatctactaaaaatacaaaagtagccgggcgtggtggtgcatgcctgtaatctcagctgttcaggaggctgaggcaggagaatcacttgaacccaggaggcggaggttgcagtgagccaagatcgcgccattgcactccagcctgggcaacagagcgaaactccgtctcaaaaaaaaaaaaaaaaaagtgccttaaatatttaatcttatttttaatgaaagaacaaaaatagaatagctaagttaattgccagcactgtctattgactttctatcacagcaggtaaaagcataccttccccgctacaccatgatcttatgtttctccctgtgtttcttccaattgtagcacactttttaattaaatcagtaatatttacatgattatgactctgcaaatattattcactgctaagtcatatggtgttttcactgtgcctctgcattacatgtccttcatcctgtctctgaaacagttctgaaatctgagcacttctgcaattcttctggatcttcttttttcctagcctacgttagtttatctatccaaatatcgttaagtagcctctgggtgctctgtttgctttcacatccattattttttagcatgaagctaattttctgactatattcatttgcctgttttctaacagctgtttttcccccaagtattgtagcatttatcacatgcctttcaaagatattttccatctgcgaaaacacacctgttgctttttatgtttgtgtggggggcaactttctttggccttttgtcatcctagttcaatatagcgtgggtttccctagatatgcttgatgtctgcttttctgggctaactccttaaagtcttttgggatctcacgtaactgctgtcttgtgtgggatcgcctgtgtcctagattctgtgtttccttctgtcctgttatggtctctagttgtacttgaacacattttcctgggtggagatgttaaaatccctcctctttgatagagagtacacctctaggttgaatctaaattttatggttctgaagacattttgcagttgtgctcttttttttttttttttttttattgatcattcttgggtgtttctcgcagagggggatttggcagggtcacaggacaatagtggagggaaggtcagcagataaacaagtgaacaaaggtctctggttttcctaggcagaggaccctgcggccttccgcagtgtttgtgtccctgggtacttcagattagggagtggtgatgactcttaaggagcatgctgccttcaagcatctgtttaacaaagcacatcttggcaccgcccttaatccattcaaccctgagtggatacagcacatgtttcagagagcacagggttgggggtaaggtcacagatcaacaggatcccaaggcagaagaacttttcttagtacagaacaaaatgaaaagtctcccatgtctacctctttctacacagacacggcaaccatccgatttctcaatcttttccctacctttccccactttctattccacaaaaccgccattgtcatcatggcccgttctcaatgagctgatgggtacacctcccagacggggtggtggccgggaagaggggctcctcacttcccagtaggggcggccaggcagaggggcccctcacctcccggacagggcggctggccaggcggggggctgaccccccacctccctcccagacggggcggctggccgggcagaggggctcctcacttcccagtaggggcggccgggcagaggcgcccctcacctcccggacggggcggctggccgggcggggggctgaccccccccacctccctcctggatggggtggctgccaggcggagacgctcctcacttcccagacagggtggctgccgggcggaggggctcctcacttctcagacgggggcgctgccaggcggaggggctcctcacttctcagacggggcggttgccaggcagagggtctcctcacttctcagacggggcggccgggcagagacgctcctcacatcctggacggggcggcagggcagaggcgctccccacatctcagatgatgggtggccgggcagagactctcctcacttcctagatgggatggcggccgggaagaggcgctcctcacttcctagttgggatggcggccgggcagagacgctcctcactttccagactgggcagccaggcagaggggctcctcacatcccagacgatgggcggccaggcagagacgctcctcacttcccagacggggtggcggctgggcagaggctgcaatctcagcactttgggaggccaaggcaggctgctggaaggtggaggttgtagcgagccgagatcacgccactgcactccagcctcggcaccattgagcactgagtgaacgagactccgtctgcaatcccggcacctcgggaggccgaggctggcggatcactctcagttaggagctggagaccagcccggccaacagagcgaaaccccgtctccaccaaaaaaatacgaacaccagtcaggcgtggcggcgcgcgcctgcaatcgcaggcactcggcaggctgaagcaggagaatcaggcagggaggttgcagtgagccgagatggcagcagtacggtccagcttcggctgggcatcagagggagactgtggggagaggcggaggcggaggcggaggcggcagaggcagaggcagcagaggcagaggagacagaggaggcagaggaggcagaggcagaggcagttgtgctcttattacagtgttgttcttgaatctattgccagtgtgtgatacgttatttacaaccaggttttagttatctgcggaagctttttagaatctctctctctaaggttctgaaattttataacagcttgttggggatcttttcattttattgaggctactaaacctgcagactatctcttcttgagaatttttttttattttctctgttacttttttactgatagtcttgttattcagatgctaggctgcttagaccagtacacctgcattgatttttaatttttccccttctatttttttcagtttgtctttttattctagttctgggatattctgtgactttatcctctactatttctattgaattttatattttttgagagtgttttaaggttttttttttaagttttgctcctgattttgactggtcctatcaattccttttttctattgttttgatctcttttcttggaggcttccctccaatgtgtggtggtccctggcctgctttatttggaagcaggatttctgttaactgatagcactcagtgtgaggccttagaagcctgactagcttttcatttgggagacctcagtgtattatttggggatctttattgaagacatttcagtttcttctgagaaggatctcccaattttctgcctggaaagtaaaagcaggcctggaaagtaaaagcagagttagcgcagaaagttggagttccatttttggtgtacagttttctttatatctcaggtttaagccatggtgtctctgagccagaaattctcaggtttgatatatccagagaacacacatctaagtttcttgtcagatggaaggacaggtggacttgaggctctagttagagatttgcaactgaccttgctggctttttttttttacattttaccctgctttccaaagtgccatttgcctgtaagttcacaacctgcctttagttctgcaagacaaactggcttgcttctgttccagtcactttctgtaggcaccaaagttgtgtttctgtgttatttaccactcctttatctacttttatgtctcagcatttattaaaaattatctctgtcaaccttctgtgctggtcatgggtgtaacctttattttatgactaatgaggtttccggagggagatgaaataaatttgtggtcaatctattatatttaatccaaatttaggacctatgtttaaatcaaagtctaatttgagtataattaatgatattaaggcagagaactttttaaattaatgtatgtataataagcatattacacttttctcctaaggccttgtttaatattttcattcaaagtttatccactgccatatacttcccattacttcacaacatatatggagctgttttcctgaatgcccaaagtgttagaaatatttaagttaattaagatttgttcatttttagcctggtcaacatagcaagacctcatgtctacaaaaaggttaaataacaaattagccaggcctggtggtatgcgcctttcatattacctactcaggaggctgaggcagaggatcgcttgagctcaggagtttgaggctgcagttaactataattgcaccactgcactccagcctgggcaacaaagggagaccctgtctcggaaaaaggaaaaaagttactaattctttaaaaacatatataaaatttgtcctgcccaaaaggagagtgaaaaatataaactttagtctttgttttattttatgtttgctgagaaaaatgctgtactttatttatttatttattatttccataggtttctgggggaacaggtggcatttggtgacatgactaagttctttagtgatgatttgtgagatttaggtgcacccatcacctgagcagtatccgctgaacccaatttgtagtcttttatccctcaccctcctcccagcctttcccccaagtccccaaagtccattgtatcattcttatggctttgcatcctcatagcttagctcccacatctgaaagagaacatgatatttggttttccatgccgagttatttcacttagaataatagtcttacttccatcgaggttgctgggaatgccattaatttattccttattatggctgaggtggtattcctcatatatatatatgtatgtatatcacagtttctttatccgctcattgattgatgggcatttgggctggttccatatttttgtaattgtaatttgtttgagttcctcatagattctggataatagccctttgtcagatgtatagactgtgaagatttcctcccactctgtggttgtctgtatactctgctgattgttcctcttcctgtgcagaagctctttagttgagtctcacctatttgtttctgttgcatttgcttttgtgttcttggtcatgaagtctttgcctaagccagtgtctagacgggtttttccaatgttatcttctagaacttttatggtttcaggtcatagatttatgtccttgatccatcttgagttgatttttgtgtaagatgagagttgaggatccagtttcattctcccgcatgtggcttgccaattatcccagcaccatttgttgaatagggtttactttcttcactttatgttttaggtggctttgttgaaaatcagttggctataggtatttgagtttatttctaggttctctattctgttccattggtgtatgtgcctatttttatatcagtaccgtgctattttggcgactatggccttatagtatagtttgaaatcaggtaatgtcatgcctccagatttgttgtttttgcttagttttgttttggctatgccagttcttgtttggtccatataaatttcaggattgttttttctagttctgtg

SEQ ID NO: 97460 - DNA, 33894 bp, Homo sapiens
gactttgagatcctccttagaaacatctcttcacctgggatcctgggcttctggcctgtagtgcccaatctgtccacaagagggcaggcactctttgctgctttggggttgtacagggggctgtggttacagaaaacagcaagaaaaaggaagacacacaaaatatgagcaatacaaaacagcccagaagagtgggagaaggtatcctcccaccctgaagttgtgcttcctccaggatcagcataatagaggagactgttcctttgaaatcgggattagtggattctgtttgtgagaaataagacccatgtttagggaaggctgtaattgtaataaccccaaaggctggaagaggtgaaccaggcatcaggaagctgatgccctatccaggagcagccaaggaagttcattgatgctgacagccacaggggttactgagcacaagaccggagacttggccctctgagctgttccctctcccactgaataggggccaggtagggtgtcgagagcatctcagcccccaagagcagtgcccccacaagcagctctaagatccaggtcttgttggagggcatgaagggccaggaagtgaaaagcagaagtagtggtcactgtcacagccaggtaactcaggacttgagaaaatggcttcctgagtagaaattccccagaaagacaggctgagatgaggcagggctgctcaccttctcaatgccatggagatgatgagggaagaaccagggcatcttggagtttgagggaatttacttttgtccataagacattacgagcacctggcctgagcttggttctgggttggatactgtgaacacagagcttcccaaagcttggactctttccttgagaagcattgtataagatggtaagtactgagctagagataggtatatagaatataggatatgtatatcatatgatgttatattggatgaatataggatatgtatatcatatatgtatgtatatatgatatacatatcctattatacctatatataaaatatatataatataaatatataatatataaaatatatataaaatataaatatatatataggtgtgtgtgtatatatatatgtataaaagaaggacactctgccagctgatgtgctcagggagggcttcctgtacatggtggtgctgaatggggtcttgaaggataagtaagagttgaccaggggcaaacaagtcaggagaacattcccagtgagaaaataataaaagtaaggacatggaagatggaacacttgtgtgcatgtatgtgtgcacatgtgtttgtgtgtgctgctgagattttacctacaaaccttttggagtgtgggagcattgagtacaagtacgcaggggcaggaggtgtgtctggaagggcaggccctgtagcagttgtcttcctagccaggtgaaggactgaggagagtgggtcttattctgagagcagtgagagacattgaaggatgttgtggtctgctcaggctgctataacaaaataccatagaccaggtagcttgtaagcaacaggtttatttttcacagttctggagactgggaagtccaagatcaaggcaccgtgaccctggtgaggacccacttccagggtcatgtcctcacgtggcagaaggagtgaaagctccttttgtaagagcactgatcccattcgtgagggctccgttctcatgacttcatcacctcgcaaaggccctcccttcaaataccaccatgttgggatttggtttcaacatgtgaacttaaggggacacacacattcagtccaaagccacaggttttcagcaggagagcagcatgtccagatgtgtgttgtacacagactattttgactctgtggatctgagacagttggggatgaggcagaaatctcccacactcgagcaatgataaaggtcaaggtggcagtgaagcggggagtgtgaagaggtggtaaaacttgcagcactaattgcagcactaagatagaggcgagtcacgcaggcgcaggcgaggcacagcaagaggcgaagaagagtcccggggctgggttatgtgacaaagggatgactgggggaccatttgttaagataaggaaccctggagatagtaataaattggagaaggggctcttggcccctcttggatgatcctgaagttgttggggcaggaccaaaggcaagatccatgccaacgctgctgaccaacccccaaaaccaagctggctttgggtctgtgtctggtgccactgggcaatgtggcctagatggaagggtgaaggggtcccactctcagtgttcttcctgtgttcttcctccttccatctcatctctatctctgggctggtttgtgagctgaaagagttcacacatacctggggtgggcctctgtctcctcgacagagtgggactgaggagcgaggcctgaagcattactggttcacatcctggcccgaccagaagaccccagaccgggcccccccactcctgcacctggtgcgggaggtggaggaggcagcccagcaggaggggccccactgtgcccccatcatcgtccactgcaggtgggtcctcccagccagccactggagcggggcagccccccacccgctgggctgccctgcccctcaccccaccggtcccctcggccctcagtgcagggattgggaggaccggctgcttcattgccaccagcatctgctgccagcagctgcggcaggagggtgtagtggacatcctgaagaccacgtgccagctccgtcaggacaggtcagcccacgggcgggagtggggacacacaagggagctagagccccgagcgggtagagggagagacccacatgtgcatgggcggggggtgaggggcagatggaaaacactggtacggactgatgggcagacaaggagtagcgaggacagctgggtagaggggcaggatccagacagtggggggccagatgaagagggaagaaaagcagagctggtggataaaaggacagaggccgaaagtggtaggacatgtcatctgtgtccctgataggaaggggcagagggtaatggttggcaagggttggtctctccaagacgcacaggggcaaggcctggcaagtgattgctactccatggcttttggggcacctcccacagcccatccctccacgaccctgcccccactgtgcatctctgccgggcaggggcggcatgatccagacatgcgagcagtaccagtttgtgcaccacgtcatgagcctctacgaaaagcagctgtcccaccagtccccagaatgactgcgcttctcctacaaggttctctgggcactgcccagcctgagtctcggccctcacccagggccctgcctcgggtcctgggcctgctccccgcttcctccccttcagtcagctccctctgtcctctgtcagcctggcctgacccctaccctccagcattgctcttcctactgtacatattggggagtggggggcagggtcgggaagggacatgccaggccaggcctggggccccggggcctgacccacaccacgcagaccccgggctccagtttttaacgatggttccatcaatacctgatccagaatgtttccgtgctacactttgtgtcctgctgcaatgtgttctgtctgtccatccatctctgccctctgtaccggacactgtgtctcctcagccaggaaggggtaatgagctccagcccctaagcaaccggacttgcctgcctcggcctcacccgcacttctcccaaaaggcagatgacggggagttaggcatggggagctccagaaggtcaccagagagctttcagctgagggagagttctctaggttggagtgggcatcacagccagggtggcctctgggtgtcagatgctctcaggagggtgcccagcctgtgaggcactggcaaggtagggggcagatggggcatggagaacccagaggatctaggccctgttggggaggggaggggagctcaaggtttgggtggggactcagcccagatctacgtgagacatttttctgtgtcactgtgggaaagccttcccagaagtctcactgcgtgttgctctgcgtgtgttcccatgtccatgcgtgtgttgagagcccatcaggagggcatgcatgactctttggcaacatgtattatcttggagccacgtgtttttattgctgactttaaatatttatcccacggcagacagagacatttggtgtctttttataattcgctcgtggtcattgaatagagcaataaacggagcattttgagcaaaactaacctcctgggtctgtgtgatttgcctctcccctccactgccttccttcctgtacttgggtctttgtgcccctccccagcatgagcacagtgagcttggcccttctgctcactggagccccttgtggagactgggagtatggagcgagtccaaatttgtaaagccaaactgggaacattctgcaggattctcacacagcctcagccctggccctgacacatgctctgggccatggggagcctcaaggacaggtgtggaaggcttccagggaaggcacagtggctggcaggtcaccatttccaacagatgtgccagagaagccaaggctagggtaaggagacattcaggtcacacccaggcccctccctgttggccaaactcttatcccatgttagctccacagatcccaacagcagctgcagcccagtaatttcccttgtaaggcctgggctcagagtagctcctcccaaggggcccagggaatctgcatgtgggctgagatcctgagccatcctggacactcctgctctattcttgtcccctgcccccctgggatggagcaaaagtagccatgatgccactgctggcaggtgggggtcaccccagggcagaaggaggggtccagggcaagggtgctgaccaacaagtccttacaagatgccagaaccttgggtgggatccagggtccaggcatgcggggtgtgctacagatgatgagaaaacaacagggtgggctggacacggtggctcacgcctgtaatcccagcacattgggaggccgaggggtggcagatcatgaggtcaggagttcgagaccagcctgaccaacatggtgaaaccccatctctactaaaaatacaaaaattagccgggcgtagcggtgcacgcctgtaatcccagatactcaggaggctgaggcaggagaatcgcttgaacctgggaggcagaggttgcagtgagccaagatcgtgccactgcatccagtctgggtgacagagactccatctcaaaaaaaagaaaagaaaagaaaacaacaggtggctgaagcagcccagatggaagtccttgagaagaggtggccatactctccagtcaccctcaagcagagacctccccacaacccccggaggatgggccctcctactcttctacccagattagggagattgggctgttgaagtgggaagaggaaggagacctaacatttccctgttcttccccagggtggccttgtaaagatactcaggctgtgtatgaaccacacataggagtgcaacatgaatgggaacccctggatttgtgtagcaacgcagcagatcccagaggccctccccagttcaccgtgtcccagtccctggaaaatacagacctgttgctttgctccctgagccctgctggactatgcatgcacctgtacctgagtgtgtgcctgtgcacacacactaccctgagcccctcagctcagagaggtcctacccagcagcagtgagagccaaaacctgtaccacaagggaacaaaaaaagtacccctggactgccaccctcagcctccttcccgcctggccttcagtgtttcccccagcctggatccagctttgcttcccgcctcccttctccaccgccctccccctccccccacaaccaagcagtgtgccatctagctgagacagctgcagagcctgactaaggaatcgcccccagggggccagacatttaaggaacagatgacactggtagcctcactgttggggcaaaggaagaaggagacgggccaccctacagtccaggcactagctgagcctccaaagccgtggacacagcattcgagtgttgggagggactggtcagtgctgaaggtaaggctcccctcctccctcaggaaggggacaaagctgaccaccttctgagcccagaggggactatagggtagagggcaggaataggaacaggggagtagtctcagaacccaaaggtagaagcagcccaggcagagatatattagggggtggagagagggaatagagtttaacccctaactacctgggttaaagaaggctttggagccctctgggacgccactggactggagtcaaaagctaggagtctagtctgagtgaccttggacaggtcatttctttcagacatcagtttcctcatatacgaaataggactttaaaaactgcaatgctgggccaggcgcggtggctcacgcctgtaatcctagcactttgggaggctgaggtgggcggatcacgaggtcaggtattcgagactagcctggccaacatagtgaaacgccatctgyactaaaaatacaaaaaattagccgggtgtgatggcgggtgcctgtagtcccagctactcgggagcctgaggcaggagaattgcttgaacctgggaggcagaggttgtcgtgggccaagatcgtgccactgcactccagcctkggcaacagagcaagactctgtctcaaaaaaacaaaaacaaaaaaactgcaatgctggccacatgcagtggctcacacctataatcccagcactttgggaggccaaggcaggcggatcaatygaggctaggagtttgagaccagcctggccaacaagatgaaaccctgtctctactgaaaacacaaaaattagctgggcatggtggcacgtgcctgtaaacccagctgctggggaggctgaggcaggagaatggcttgaattcgagaggaggaggttgcaatgagccgagatcacccaaaaaaaaccgcaatgctggttaaataaaacattgagaaaacatggtgctctgaacaggaatgaggaaacgctatcatctggtatggaaaaaatctccaagacacattaaatgaaaaaagaaagggtcagaatagtgtgtataatgggctaccttatgtgcttttttaattaaaaaaaaaaaaggaagatgataagaacacatgagttttcctatttgcatgatggaggtctagaaggagcctagagactggctacctgttgcaatggggaaggttgtaagatagacgcaggagtgggagggagccygtccatatggatttttatattgttttattctttaactatgtgattgaattaccagttcaaagaaaaatgtaagaaaaactaaacctttgcctttaccatgtcgcaaacacaagcagaattgtagtgatgttttgtcatctgttttagcattccaccagtgccggggtccccagggcccaggaataagagacacagcttccttctaaagcccactccagtatggcttagtcaggaagttctttcttaggtctgactgcattccctcctgatgaaacatccagcactgcctccttagtgccatgtagctatcaataggtatcctcaactccctccaggccttacttggttggctgggtaagtctaagccctataacctctccctctgagaccctggaatagtttggagttactcagtgagaggacaggcctattgggtctggtaactaaccaggaaaaggaagctaggaaatgaagaaaagagagctcgactgctctcctggccctctcctgtgtgcttccatctcctcttatgtctgaacacacacataacatctctgaatctccctcctactccctgtcttgtccttcatggcctcatcctcttccccagtctcacaggtgagtgcccacgcctgctgtcaccatgacaaccattcacagccggcagatgctgcaggagcacgtgtccatggagttctccagctccaccacccacgtgcagaccttctcccagacaaccaagatcgtgggaggcaagtggaatgggggcagggaagggatcgggaagggcagctattcttcctccacacccatcccttgggtggccccagttttgccactaatgggcccctctggagcccacaataccaacagcaacccccacccaacgtgtgcttctaatcttggctttgttaaagcttcagccagctggatgttcaacacagatcagatctccaggaaaacagcttagaaaagatcaatcatgtggatgtgtgtgaatgattgataaactcttaattgctgaaggagatcagagccataggtgaacagattctatctccaaaggtagaattycaggcataggggaaattaggaaggtagccaccttatctacatatcagtaatgctgaccctgctccacttaagaaataggagacttggggctaccagtggagaaagaaggtgaacacataaacaagaaggtgaccttaccttccaggcttttagccctctggggccagacttggaaragggcagatccaagggaaagctgagaaatggtctcagagctgaacagagtgttttagtcacgtctctagtggaaagagattaaaagatggccgggggccaagacattggataccccttctcacagtcattgcccctccctcaaagcctcaaagggatagagtccctcaaagtcctccgtgcacagaggtcaaggccagataaacactctataccaaccaacacctcctggccagtgaggcagagcaagtggaacagctgggactcaaggcctatggtctagaccagaagttccaaactcaagtgatttacagcagtgattctctgctgtggccgcacatcagagtcaccttagtgcagggggtgtgaggagggcaaaaatatggcagtacctgagtctcaccccagaccattcaatcaggtatttcttataaagttctccatggattatatatgtgcagccaaagctgtagaccactgaccracagggcccaggcagggaacataaatgtggggaaaagactggggtaaactagagactgtatatcccatctaaaggggcagccactattcacctcccactgactgttgccatatgggaatacaggttcagtgttgagaatccagaaatctgaatttttatgtgaaatctttctctttcagatgtagggctacttttttgtttaaacattgtggaggtcacataaaagacatctgcaggccaggtgtccactgcactctgcctgtttgagacctcttgytagtatttaaaagcaggccatgagagcttcttaacacacttttccccctctgtcagattagtgggataataaaggcacctacttcagtgggatgctgtgaagatggaataaaatcatctctgatatgtgcctagcacagttcctgactcaaggaaagtgttccatgattcagagcaattgttgtgaattgataactcaccagccaagaagattgtctgtagttttatactgcaaaaacagttttttttgttttccaaatataaaattatatttccacattgaagatgtgctttcagataaggatattcccatatatagctccactggagtgggactgtgtcgtgtcctgtccctcactcaagaatcactactcccaaggcaatgaatgctgaacccacagaatggcagggagaaaatctagagcagagctcagccaagctgcagacctcccaggcagaagcaggcctagcccctcttaatgctactgggggaccaggacttccaggagagaagcctaagagaccaagaaaattccaaaagagaagcctcctttaaaaaaaaaaaattaggactcagggctgtggccccataaaggtaatggaccactgaggtgtgggaaaggagttcgcctcccctagtggttgaaacttgccataacacaatggcccatcgactcaccctgctttctccccatgtagctggtcctgctcccacttccctaaatgctctttgttcccatgctccaccgtcctctcaagaaagctctgtcctcccatcgcgagctgggcttctacctggagcccattctgacctctcgcctgcccccacagaggaggtcgtgaggaggaagtcctcgagcatagtggagttcttcagcttagtgacccggagctcaaacatccctgcgggcgacagcgtccctgagttcgtggagaagcctcaaccggtcaccgcgcccgagggtgtgttgctgcctgtggctcaccgggctccagtgcttcgctttctaatcgagtgcccccaccctccgtcctaccccaacgacctccaatgctaaaccctggcagagcctggccgagggttcctcccctgcccggggccaggcccaggtgtctgggaggaggcagagagcmggcagagggtggcagaggctctagcctggtggctaagaggcgaaaacgcgtcctgtgctcatcgcaggggacaaagccgtgttccgagcccgggtgcaggggaacsccaaaccccacatctcctggaagagggagagcggcatccccatcaaggagtccgccaagatattctacgacagcattaacaaggaacacgtgctgaaggtgcgggggccaagcccaagtccagttaccgagaaggccagaggcagggacccccagggcgggccgccagtcttctcaccgatgagagccttaacggcggcccgagagccgggcagtgggaaaagcagctgtcattgcccgagaggcgcggcaggataagagaggccgagtcaggaaccgggatattgccggaatgagcagaggacccaaagtacccccggggcagagcagagcaggggcagagccagaacgtggcggggcgggacgcaatggaagcgaaggggcgtgtccacaaggcgagtgagccaaaaggaacgcgggaccaagacggtgggcgtagccatggagggcgggaccattgtgggtggcgaggtgccggagggactcgccgtagagtaggggtgagggtcaggggctccgggctcttcagctgaaccctccccaaggaccgaccatccttaggtctaaccagcttctggatcactttctgagagctgggcctacccagctgyaacccctggctccaggcccttcgaggaaagggagggatggatcacggggagatctaggcctataattacttatgatcctataatcactcgggtcctgacccgatttcccgttgtgaaaggcaaagagcctccttttttccccacagacagaagtagtctgctcccaaagacccatcatcactggaccctaagcccccyacagcacacacgagctgccccagtccccctgatggccacctcttacacaagctcattcattcagcagacactttctgagagccttggcttctgagagcctagcaggcttctgcaagcaccatgcagacgggcatcaagtcagccttactcaccactgttscttctggggctcagcccagtgtctggtacagaggagtaaattgtattaaatgaagtctcagccagatgatgccagaaactgcagatagagttacaaggcaggggaagccctgccttctgggagctcacagccaagggggagagtccgatggagaagcagacagttttaytgctatggaatcaggctacaaacatgcatactcacactgactgctagctggtacctccaaatcatacaggctgctcaatcctccacacatatacccaacagtcagttcctattgtcccctaaaaaaaaaaaaggcctcctaccttatctgacagaaagtctccctgtggttccttttccttcccccactaatggcsggactttgatccagctggagccackgacttcggatgactctgacaactataagtgcattgcaagcaatgaccatgcagatgccatctataccgtatctctgctggtaacagaaggtgagttggccccttcctcttggcctttcttcttagggaccagactccccctgtctgaacctgtccctctgtctatcctcaggtcaagagaaaatggacttcaaaaagatgctgaagaagaggtgaggctggcaggtccttctgcccaagatattgtctcctcatcmaggccaaagcctctcaaaggcctctcaacaaggccctgagttccaagaatccatggagtagggaggggtttctcaaggttggagaggcattgtgtacaagcttagtcccttcctccttctcctagggcaccccctgctcccaagaagaagcagaagaaggtggcaaatgagaaagagatgctggagattttgtccaaagtgcccaagaaagactttgagaaggtgtgcatggagtatggtttcaccgactttcgggggctgctcaggaagctcaaagagatgaagaagaaagtagaggtggaggtaagtaccctgcagggagcaggggcctgcaggctaggggcagggcttcacccaaagtgctagtgcctgtgtatttctcagcaagaaggtctccccarttctgcacacacatactcagaggcgtactctccactgtgaaagcagcaagggagcacaagtcaccttccttctacttctgtcttcaccactcccaaacatacttgcatggactttggagtcagatagaccgagattcaaatcccagttctaggctgggtgcagtggctcacgcctgtaatcccagcactctgggaggccaaggtgggtggatcacctgaggtcaggagtttgagaccagcctggccaacatgatgaaaccctrtctctactaaaaatacaaaaaaaacaaaaaaaaacaaaaaaaaaaccgctgggtgtggtggcacacacctgtaatcccagctacttgggaggctgaaacaggagaattgcttgaacccaggaggtggaggttgcggtgagccaagatcacgccactgcactccagcctgggtgacagagcaagactccgtctcaaaacaaacaaacaaacaaatcccagttgtactgccttattagctgtgtgaacttgggcatctctctgagcttcagtttcctcatctacaaaatgaaaattatacttccttctttcatttgtttttgtgttgttgctgtcattcattggttcactcaaccaactcattaagcctctacactggaattagggaatctatataatgggcccaggtacatagtgactattccatgaatgatggttttttactcatcccccgtaatgttcctctcctcctaaatctttcagttgatcactggagcactgcacgttgttatctaatgagcctagtcatttctccccacatgcttaagagtttctccaggattgaggacacagtctgggcaggctttgggtaccactgacacttgtcattttattatcataatctctcaggccatccggattctgaagcccctggaagacaaagagaccaaggttgacaccacagtggtctttgactgcataatggaactgaaagaccccaatgtcaagatgatatggatcaaggtgggggatgcctagccagggtccaccttggcaatatctcttcctctctacccccttctctcactgtatataagccatagcctctcttccatcccatcaagaggatgcctcctggtatggttgaaagaggctggaattgggctctactcttaactgtttcacccctttgttgtgtgatgtaagagagtcacattcctctctctatgcctcagtctacccatctttaaattgaaaggctagattagacagtcttgaaggtcactgaagatctgtgcctctaagggaaagcatctaatgaactcatgcatattaagagctcgggcctgtgaggaggcctgtggggaggcaggaatcttggatcccaccaaaccagatgatgaggctatagagatcatagggatctctgtctttagagggttggacatgcaccctccagcttaggctggcgctggggaatggagacctctggaagcttcctcctaaagcccttcatcagctttcctacctgttccatgaggcagggtactgagccactgaggatccagtactccctgggcaagtacgatgtgaagcagatgggcaccaagtacatgctggttattagcaacgtgaacatgaacgatgctggcatctacagcctgtccgtgggcgataagcggatgagtgcagagctcacagtgctgggtatgagtgggggcatgcaagggcacaaggaggacatgtcgggttggaagagaggaatggccagggttgggatccatggggatattgaagagaggactatgggactgtgcaagaaaggaytgtgtggggatgggagtcaatggagggaggaagcatcagatgtaagggagaggactatgagataataagtgccttggggctgtgtagcatagtgattaagaacatagactctaggccaggcgtggtggctcatacctgtaatcccagcactttgggaggctgaggcaggagaaccgtttgacaccagaagttcaagaccaacctgggcaatatagtgaaaccccatctctacaaaaataaataaataattggccaggtatggtggcacacacctgtagtccttgctacccagcacgctgaggctgcagtgagccatgatcctgcacttcactttagcctgggtgatgaagcaagaccctgtctcaaaaaataagttaaaaaaaagaacgcagactctggagctaaactactagaggtcaaatcccgctttctgccacttatgagctttgtgatttaggtcaagttatttaacttctctttgattcagtttccccatctacaaaatggggaataatagaatctacctatgtgataattggatgaattagtatggctaggatggtgcctggaacgtatctaaaaccacataagtgcttttaaaattgctgttaccattactggggagaagaccacatgaacatcataggaggggactccaggagagaagggctcgaaaacaaaaccaaaggcagggtgctttcccccagccatgggctacaggaggccagtgacatgtgagtgccctcttcaccattccacccctcaggagggaccagcccaatgactaccactcctactgtttgctgcagatgagccactgaagttcctgggagagatgaagcctgtgaaggtgacagagcgccagacagctgtgtttgagatccgcctctccaagaaagagcccaactttgtgtggaagttcaatgggaaggagctgaagagggatgacaagtatgaaatcacggtgtccgaagatggtctgacgcacacgcttaagattaaggatgccagactcagtgacagcggcgagttctctgctgaggcggggaacctggtacaaaaggcccagctcactattgaccgtgagtggttgggcaagagcctaaggggtgggctttatggcacagcaacctccatgcaggtagtcatcatttatatatccatctatccatccatctcctttttgcaaagccctgtggtaggtactggaaagacagggggatctcctctctgttaacccctagtctagtaggggaggcaggtatgaaaatgaaattagaatagcagttattattccacgagtcaagacacactgggtcttattatcagctgtgagatcatggaccaagaaagtattagtctatgtctctaatgtcatatattacagcacatctgtgtcactctkgactacttacattctgctatcacaactactttgggagttcgcacataatgtaggtacaccaatgagcatgtcacacatctgaaccgcacctggaatctatatcacatggaatcatcattgctgtgatggagggagacacaagggctgtagaagaccaaagaaaaggcatcacctggcaacatcagaaatgatataatgaaatgatgtccgagctttaccaagaactaaaaggagttccgctttcaaagaatgagggagagtagagaacatccccagcagaggtaatactgctttcaaagaatgagggagagtagagaacatccccagcagaggtaatagcatgtataaatgtccagacattagaaagacaatgcaggtatggttggagctccaagggggcattagagatattgagcactgtaaaagttctcaccccattttacatacgaggaaactgagactcagagaggtaaatgagttgtatacagtcaactagcaagtcagggccagagctgagactctccctgtcgggtacttctgtgagtcacatattacacacaaacacattcagcatcacaagttcttktgttttctggggacagaaagagggacagggcttttggctctatagctgcagaaaaaagatgtcgtggtttgggagcaggcccaagtgtctgtctgtccacaggcatccccatcaagtttgtgagcaacctcaaaaatgtacgtgtgaaagagaggagtcgcgcatgcctggagtgtgagctgacatccaaggatgtgacactgcgctggaagaaggatgggcagctgctgatgcatggcactaagtacagcatgaaccatgagggcaagcragcagagctgatcattgaggatgcacagctcagtgatggtggcgagtacactgtggtggccatgcaggatggagaccctactgaatactacaktactgccatcgtcactgtggagggtaacacccgccctatcaatccccactgaccaatccycctgaccctggcattcccttacagtggacatcaattgcccccctcccactaactccaaccctcccgtagaccatgaccaacttgtgtctccccactctgatcaccctcacctcctaaattctgaccatctctgacctctcatgccctaaacatttatacctcctagacactgatcaccccccatcttccagactctatcccaaatttcctgacttcatccttcactttcagactctaaccatccccagcaaccctgatatcccagacgtcttgatcccgaccatctcctactacctaaccataaaccactttccacagaccctggctaccctcaacccccaatgaccctgtgtatcccacagtctagcgtaaccacaactaaacatcccaactccagtaaccacctgcatcttcaccatctatttccctctccaacccagcatcctaagtccctgctgaccacgctccactaatcaattccccactagccatctcccagttttcctggtcaccatttcccaagccactgacctttccccatccccctcccatgtgttgctccagttccccccactgaccaccccctaatcacctattgaccacattggcaagccgcctgctcatcataaattattttgattgacgcagcacccctgaccagtcccatgaccattgctaccagcccttttcccagaagtccctcccaccccaacatcctgagccagtcccttgcccacctttctccccagagcgtctggccacagtgaagagcgggatgtccgacgtgcacgcggccactgggagcccagctgagttgtgtgtagtgctgaatgacgagaaggtggagggtgtgtggctgaaggatggcaaggaggtctgaagcagaggccagggaagggggtgaaggaggtagacctggcctatgctcacactcaggcccacccctgacccccagatcacggacttgccaggcgtgcagattgtgaagcagggtgcagtgcacaagctcatctttcccagtatgggccctgagcacgagggcaagtacacattccgggccaagggcacggaaagtgaagcctctgtattcatcgcaggtatggatctgtccaaggtaggcaaagctcaaccatgcctggcccacctacaagctcatggcttctcccctgccccatgggctcctccatgccaatgctcaagccttccctgccgccccgccccacagatcctcctaccatcgacccgtcagtactggaggcactggctgcgcacgccatcactgtgaaggtaggccacacggcccacatcaaggtccccttccggggaaaaccactgcccaaagtgacatggtacaaggatggcatggaagtgacggaggaggaacgcgtgtccatggagcgcggggaagaccaggcactgctcaccatctccaactgtgtgcgtgaagacagcggcctcatcctgctcaagctcaagaatgaccacggctcagccacggccactctgcaccttagtgtgctgggtmagggcagggccagtcygggctgggctgagctgagggcacctgctgcccagactcagggcagaaggcaggctgagkaggaggccagagttagagttgaagtttgggctgggaatgggcctagaaggctggctttgcagccagaagcccgcttcctaacttcccagccagttcttggccgagtgaacctccctaagtctcagcttcttacctggaacagggtgattttttttctagtatccatttctagttaatttaaagtgcacagctaagaacacaggacataatatactttcagatgttacttaagtattgttattgacttgaagaggaaaacttgataggaggtaagatggaaatgaggtgaaagagaggtagaatttgccagacacggtggctatagctcacctatagctcacrcctataatcccagcactttgggggtccaaggcgggtggatcacttaaggtcaggagttcgaaaccagcctggccaacatggcgaaacccggtctctactaaaaatacaaaaattagccgagcgtagtggcacatacctgtaattccagctactcgggaggctaaggcacaagaattgcttgaacctgggaggcagaggttgcagtgagccaggatcaggccactgcactccagcctgggcaacagagcaagactctgtcaccaaaaaaaaaaaaaaaaagaaacaacaacaaaaaagaggtgggatttagggatggaggtgaggttgtttggaaagagtagtgagtttgaaagtgaaacagggtgaggtgggaggtcagatagagctggagataaaataaggtgggaaagatggaatggggattgggaatgggatttgggatttgtctgaacatgaggatataagaaaagagaagaggagctggcctgaatgtacttatattcaacacgccacgtacacgccatcaccacctcctctacctgcatttccatcgagctctgggatgggaaagtttgagtttcaattcaattcagcagcaagactgagcacctgctctgtgttctcactgctgtgtacacagagatgaagtatccccagcagttcctcaatccaaaaggggtgaaactggtagacagactgtaattataacgtaaggtaaacagtggtaccagcaagtactggtgttctcaaagctcagaagagggggagaacttgtttggaaggggacagggagatcagctaagggcaggggcccctaaggtctctagtctacccattgctaggcagatgggaaactcacgggggcaaggatcaaactctttgggcaagtcttagaaggagggatggtggacacagggaggggcaaaggatccaaaaagctcaaaatccagctataccctagtctgggcagacctttggtgagtgggaggaggcccttctgatcctttgttccaaagccccattctgaagctgttctctgtccccagaccgtccaaagcctccacagggccgggtggagttcctggagctctcaggtagttgtgtgcacatgaagtggaaggccccaaaggacaatggtggacgacctgtgacacagttcatagtggaacggagggcagttggcaagaagtcctggattaagataggcgaggtggacggcaaagtcaccaacttctccaccaacaaggtggaagagggaaaagcctaccagttccgtatcctggcagtcaattcagaaggtgtgagtgacccactggagacagaagaagtgtttgcaggaaatcccataggtcagtgagatagcctggtgctcagtggggaacccaggggtcagcatggggaccttaagccaggaaggaacactgatctgtggggaattccacaggaacatctctctagctgtctcatgagacagaccgattccagagtaaaaacagaacatcattttggacaggaattgtcaacgttgtccagtcatatcacatgcacaacacactcccatgggtatacccaggacgtgcacaactttggggaactgactccacttctttctccatcccagaagtcatcccagaatccaagtgagcatgatgttgctttagggataaccttgaaaccactctttttctccacagaaaatccttgacaacattggcattttaattataattgcaggctgggcacagtggcgcacacctgtaatcctagcactttgggaggccgaggtgggaggatcacctgaggtcaggagttcaagactagcctggccaacatggtgaaaccctatctctactaaaaatacaaaaattagctgggtgtggtggcgggctcctgtcatcctggctactcgggaggttgaggcaagagaattgcttgaacctgggaggcagaggttgcaatgagccgagatcatgccactgcactccagcctgggcaatagagtgagacttcgtctcaaaaataataatattattattactgcaaatgaattacttgctatacctctcccaactgatctccaaatctccatgtcaggacagtagattgagaatgatgggattgggggtcacaccgtaggaaagtttaagtcactgattctcaatgtcggctatacattagaatcacttggtttctttaataatgctaataatacttgccattcacaccaggcatagaatatgggtaggcaggacccagacactagttgttgtcagtggttttttttttgttttgttttcatttttgtttttacttcccacttgatgttaatgtgcaagcaaagttaagaatcatttgtgccaggcactgtggctcatgcctgtaatctcagcacttcggaaggccgagacaggaggatcacttgagcccaagaattcaagatcatcctgggcaacagagtgagaccttgtctctaaaaaaggaaaaagaaaaaagaatcactggtttgagtttatttaagcaggcgaggcagaagtcagcatgaggtgggcarctatctacatgctccccctcctaacctttgcactctctctktcccccacagagcctcctggttttgcctcccagcctcaagtgactgatgtgactaaagaagccgtgaccatcacgtggaatgcccctacccaggatgggggagccccagtgctcggctacattgtagaacgaaggaagaaaggcagcaacctgtgggtgccagtcaacaaggaccccatccagggtgaggtccttggaacagaggcccaggagtgaccaaaggaggtcttgctgagtggacccattaactactgacacagtccctcmtccaactcttctggaagttttaacaacatcccatgacctcctcttctatgtctctcactcttgttctcaccccatggatgcctctggcctcacgacccctcatcttcccatttcaggcaccaagtgcactgtggatggtctcctggaggacacagaatatgaattccgagttatagctgtaaataaggcaggccctggacagcccagtgtgccatccagctcagtagtggccaaggatcctgttagtgagtatgcggctgccaggtcctgacacataatggaattagcccattcaaagtagagaaagaatttcttccccgggaaagtatgacacgaggtatcacagtctctacactctggaaactgccagcctcatagagggacaagattcacacacaagagaaagccagcaaataaagattgagagtcagggacagtgaggaggtggggtgcaaaaacgttttttaaatttcgtgtatttctagttaggtgaggtaggagaggcatgctgagggttgagtaagggtgtgaggtagatggttggagggtgttgcatttaggaagcaaggtgaaggtactgcctggaagtggatgtggtggagatggttgggttaaaggctggggttttgaatacagaagctttgaatatgtggggtatgttgaatttaaggggtattgagtttaaggatgaaagtgttaaaacagtaagataactgaatttgaatttggaggttgagtgtataaggctaggtactaagggtgttaactgagggatctggagctagaagtagtgaaggatggggttcaggagtattgagtgtgggaagtgagcaaggcattgagtggagatgagttggaggggctgactacatgtctgttctaccccagaacccccaggcctggtccaggacctgcatgtatctgattcctccaactccagcatttccctggcctggcgggagcctgcagagggagacccaccctctggctacatccttgagatgagggctgaagacacaaaggagtggtccaagtgcacaaagatccccatctcaggcacctgctacacagtgggaggactcatcgagaggcagaaatacttcttccgaatccgggctgtgaatgaggctggggttggggagcctgtggagctagacaagggggtccgtgccatgccaccaccaggtgaggacacagagagggctggggattcatgcccaacactgtacctccaaaccttctcctctggggcctcatcccacaggaaaattggatgatgctaggatcatgaaaaagtcatccatagttgttgtgcctggacaaagttaggggtaacttcaggggcacccctactaaatcattgtgtgccaaatagcatctactgtgtgtcaaggtgtaaccacccaatgggttcttcttgcgcattgtacacgcaaaaccagttcactgagaccacagcattgcaacaaagagtttaatggacacaaggccagccatgctgtatgggagacagagttattacccaaatcaattccccgaaaattcaaagtccagggagcctgcttctgactggggcctcaggacttgtggggtggagggagagcaggtccaggtggagccatcagtcgtcagaaatgcaaaaacctgaaaagacatctcaaccaccaatcttaggctctacaatagtgatgttatttgcaggagcagctggggagttgcaaatcttgtgatctctggaataatggctggtaatcttttatgtctacaccttagcagaattcaggctcctcacatcctcctaacctggtggcctttcattagcttcgcaaaggtgatttagtttgggggaagactgttatcatctaagctataaactaaatgtctctcccaacattagcttggtctgaaaccaggaatgattaagggcagtttggagggtaaaggcaagatgggggttggttagatcagatctcgttcactgtcataattttctcgctgttataattgttgcaatggcaatttcaaaaggaggtgttagggttatagaaacaagacacaaggacttgccttccagggtcttgcgtactagtagaaggagacagatgagaaaacaaataaatgcttcacagggttgcagggcagctagatgtctgtatggcctgtagtgggggcataaaggaggagaggttgggaaggctttgatgaggaggcttaaagcagagtcttcttgaaagacagatccatgcctccacctctgtctcctccatctcagctgcacccaagtttgacctcagtrcccggctgaagagtcacatggtggttcgcgctgggacagccctctgcatccatgcagccttctctgtgagttgtccctgaccctgacctccatacactgtccacataaccaagatggctattgtagccatcacagtctctgactctgactctgactctgcccctcaccagacccctagtgcgacagcctggcaggaaactcctcgacaatggaggaaggccygcccccaaatatcatctgtgtgaccagttgtgccatctcctgtcactactcagggctcaccaccacctgacgtgatctggcagaaagatggcgttcccaccaagggccgagagacaattaccaagagcaaaaaccactcccagttcctcattaatagcaccaagcgctctgactcaggggtgtaccgaatcttgcttcagaatgagtttggagaagcacgctatgacatmcatgtgcgcgtggcaggtatggagagaaggcagaggcctccaagacccatccctgtacactctccaaagcacagctccccagtgccgcttgagttcctaccacaggaaagtcatgccttagggccatgargatttctttgacaccacagagcaagactttatcatacagagtatggtcggcagagagagtagaaatgggtggaggggcaggagggacaaatggagatgaatccattaaaaattggggtgactgcttaaagagagctggaagctttaaaataaagctctaaacccccaaggaaggaatggattcatttttactgaacagtaactacatgccagtctctttacccactatttctacgaaatagtcattgtcagctctattttgcaattgaggaaagaagtctcagataagtaacttaccccaggtcacgaggctagtaaatggcagagcagacttcagaaatagttttccgactccaagacaccagctgcctgagacttgccccatcttatcttccatcggacttggcagatggctggggtggggacataatacttcaggtgccccaaggtcgctgacagatcttccaactcttccagatttccctcggccccccacaaacctacggttgtttgaggaagtccccaacacagtgactctgacctggaaccacagcccagatgtgcaggaggacggtgaggctcactacrtcatcatgaagcgggatgcaagcacagccacctggtacacggcagccgagcgtgtcttcagcaacaagtacacagtgacggggctgctcccaggcaggaagtactacttcagagtggtggctcggaatgaaatcggtgacagtgagccacttgactccagggacacctggctcatcaataaggaccagagtgagtctgggacttgcagttagggttaagtctgggtgccctgatggtggggatgacataagggtcccaaagggtacccaagaggcaagataaaatctgaaaaccattgagatagaacggttaatatctgggacgctgcggagagaaggaaatattggctttcttcggggtacttaggggtgagactaaagtggaggtggggaggtacctttgggggcagagaggacggtggaggggctgcggagggacatagagcgcaaacgcgttctgctctgaggggagggtctaacggggctgagaacaggggagggctctagggagccgggaggatgtctgggatccctggaggctaggggttaagggtgggggccgcgtcgggaaactcgaactgaggagctaaagggataagaggggagactgtggtcgctgatatgacgtaggggaagcttggaggcggagttaaaggctgggaataaccgggtccaggaagctggcgctggaatgacatctcggccccaggggtgtgggaaagcgtggtttgggtggcagaaccctggagtggctggggacggggctggggggtcgggggaggcctgggggcgggtggggagcccttaagaaccagtgtaacattgggcccccagagttggtggcgctgggaatgtggcctaggtcctcggggttccgtgtaagctgaactgtaagacgtgggtggtgggtgggggccttggggcgccctcacggcctgccccgccccgcccgcgcagtccaggacctgagcgccaagctcaagccctacgagaagaaggactggcgccacgcgccgcgcttcgtgacgcccctcaagccacacacggtgctccgcggccaggactgcaccatgacctgcgccttccttgggaacccgcggcccacagtgaccctctacaagggcgacgtcaacatcacggccaactccaagttctggtacaactccaccagcggcgtgtgcaccctcgtcatccccacctgcrcgctcaaggacagcggcgattacagcgtgctggtggagaacgagctgggcaaggaccgcagcagctgcacgctcaccgtctatggtgagggcgccgcggggtccggcctcgaggagggggagaggcgcaaaaggctggtcttgtgggccattggtcaactatttggctggcaccgttttttaatctgactgccaacaggtggtgcaaacattcttaattggccacagttcttaccactctcccatcctttcgatgtcatttgttatatgcctggcccctgcagacatgagagttctcaatccctagataagatgtggtttgcaactcttggtgagcctagacctgccttcagaaaaaagatactggtgatcaggactcaaccagactcaccaatcacgatctctctggcacggttctggaaataacctatatgtttacaaaattttgcgggtgattctgatgtgmaawaaaaattaaaactggtctaggataaggaccggtggggggcacaaacaagggaaggagcgaagggaaccctcccttttgtacatgcatgccatgtttctactcatgtgtgcacacatagggggaagcattttattccttcccagtctactgtcttcatagccacacagctagcagcatgaactctaaatgcaaagctggcctgccttgctttctgttgcttaaatttcccccagctttcctctcatggtaaaatcccaaaccaagaaggtttccccctcccccacctctcatctcaccttctgctactcctgaaccttccatgacactccattgctgtggtctccatggttacagaccttttttatccagttatagatacctttctttggggaaaggaccttgtcctgttgctctgtctctcgagtgcttagctaagtgtctggcactgagacaatatctccagagaggctgctgagctgtgtaaaagaactaggccagggaaggcactgtgggtgctatccagctttcattccacagctaaagagatccctgataactcaaatctgcttgtaagcacagcaaatgggcccagggccctggctctgccactgaccagccatgtgaccttagtaagstacctcattgagcctgttttctcatcttctttataggactatgaggcttaaatgagacagtacacaactgcctggcacaatgtctggcaaatattaagtgctagataaatggcagctcttgccccttcacactctgccaacccaagattaagggtcccagggtccagctcctggtttcctgcataggaagtccagcagtttggaatttccctggtcgccagcatcattaatataacgaatacttcctttgctctttcagacaaagatgataagtcagttgtagcatccatcaccgagagtctgcagaagaaatcaaagcacctcatgtgagctccagccaagcccaggcatcaggaggctgttatgatgtggagtttcttggcctgtcctctgcatggcccagtgtaggaagcccagtttgctctctggtgtttgttaatgtaaacattcagtgaagggatggggcaataaacgtaactcatcctttcccgttcctgagggtgatatacagcagggaccaaggggatggatgtgattgcatgatagggaatcccagacctggacccctgaaagcctagtccaaacccacccacaaggcagtgaccagccttcttgtgactgggcctggtcttcccttcccctcctccacatctacatggcactttccccctcccctcagagcttgggggcaagtcctgctgacttcatcctgctctccatcctgctccctcccatttcttcacactaggtaggtctgtgttcagagttctgaagtttgaaaggatcaagatcttccctctttagtgtccagggttcagagctagaagggattgatcatccagctcactaagtttcaaacttacgtttttcagtggaatccttccaaaacaaaacaaaacaaaaaaaaacacaacctaagaagctactggacttgaaataaggataggaggtctttgagcctgccttctctcattattccttcactacccccttaccaggaatctctgtaaaaactaatttggaaatcactgactcatccaaccacccctgagacttgagtctcctaaatcacatccccacaaatgagcaacacctctactgatggcatatccaccaccacccaaggcttccctttctacttctgggttagggcattgtctgttaagttacaaatgctcctggagcagagtgatgtattattctgccagggctttacaactaatgaatgaatcagccaatctaatcccattgctcccagctgttcaactaagcccagagtccaggatgagggagatgcttgaagggaatctggatcattttgaaggaagcagcaggtctcaagtggggaggggaggaggtgggcagcaatagatgacactgggtaactaaaggtcaccaagggtgctgggcacctgtgcacaggggagtacatcaaggacaaatttggacagtggcaaataccactcatcccccatcctcctaaaccacatcctcacccacaccagggaagtgagacacactccaaccggcacagtgtcaccagagccaggtagccagcctggcaccaagatgcactgcccaggactgtgactaggctgtgaggacagccagagcctctggcaccatgcccccatgccctctccaagataggcatgtgccacacaggcccacaagcagggcagccaatggctcttgatttttattatttttcacatgggcagcagaagatggagttgtcccatccttgctccccttgcattgaatgtgccttgggtcttaaaaccccggagtgtcattggagccccctcctcttgctcctagtgtaggagggacaaggaggaaagcactgtgagtatgtgtgttggaggggaggggtcccagctccctgagccaggctcagcacccctcagcagctccctgaggccctctctctgtgagacttttgacagacagcaggacagaaacatatagcagagaaagacataggcagactaggagacaggctacacacacacacagagaagctggccccttcctttggcatggttcaccctagccctggggataggatctaagggtagcgtatgggacctgagctttgggcttgcccgagagagagatggggctacttgaattcttgagaccccaaactccgagaccaaagaagttctctctcctgcctaacctggacccacacctcttcatgtccccacccaccacttagagactgagattgttcaagtaacaaggatagaagagggaaaagaaacggaggctccactctcatccagtcttcccaactaggggcctgtgaaaggggctcctgggtctgagtcttctcagcacagattctcccgtttccctcaactttgtgcagatgaaaaaggggaggagtgggtgaacccagcactgccattggtcctaggcataacacatggagtcagactcttccacctggtaggggaagtgggtgggggggtgtcaagaagctgagcaccatcaccttccaggggggttttgaaagtcctgatagggtagaggtggggagatgtctacttctggctccagtctgatattaggctggctcttttagctctcagcattgtcctgaaccacgagttctgctagggagatccttttccagcctccccacacgaacttgcaaattcctcaggcagtacctgctgccccaggctggcactgcagccatcctgatccagctcctgcaggtccccaggatctgggccccagccccaggaggagagaggggtgaccagaccctggcacctcagttggccttggtcagtctgtagtgttccacaggctcccggctttcgacagctgacaaggcgacgagcatctgggccgcatagtaggtggacatgataagcgcccgagagtagggcacaggaaaacagaatttgttgagggcgatggtcaggtctgagatgataaagaagagtgcaccactgccagctgccagctctgtccagcgccagtctgccccggccagccgcagccctgccatagctcgccagcccatgaagccgataagggccacatagacccccaccaggtaggtgaaggcacctgagaggcatgggtagaggagggcatagcacaggcccgacagcgctgccatcaccagacctgtccgaagagccagtggctgcatgccaaaggccgaggcgtagaacatgtgggtcacagcaaacatcagcagacctgggggtaagaggggcaaaggcagctgagggcaagcttgatgaagaatgagtaacagggtgggggtagggatggatgtggcgatggagtggagtgtttgggataacccagcagctttgctttgggataacaggggtaggaagatctaaagttaaagaccaccaccccagtcccctgaaggactctggaactgatcactagttcccctgcgaggtcatcccctaacaaggaccctcacagtccctggcctcagaaaccctcaggctccccacactctggttcaagaactccctcttccaaatctttgcccacagcccaggaccctctatcccccagccccaggactcctcccaggcaactactatggccactgaccatgcacgaagtatccttggtcctgccagatgaggaaggcgtcacctacagcagagaagacaagccccacaaagatgcgggtggcgctggggtgggccagcaggaatcccaggccatgggccagaaggaagagccagaggcagaagataggcaggcacttgatgagggtgctgacccacgatgggctagatgagggcagccagagcacaaaatacacgcaggtggccttgaagaacggcaccagtttgggtccttcactcttcacctggaggacacaggacaagggcagcactcagaacttgggggttgaaagccagcaccctcagcctaggcatccaccccagagacactcccatccatacccccacctcacttccacccccaacctgagaagactgacacagagaaacccagcctggcctgcctctaccagccagcaggttgtggccaaacccattactgccctgaggctcagtatattaggagggggacccttctgcagcctagtgtgcttctcccttcctgccccctccttctccctcctcagggcccctttagcccctcctctctgccagcaacagcccccagctgttcactctggaatggagtgaagtcagtgggaaaccacagagacaccctgactggccaactcgtgatcctcagcatggggccagggtgcagccttagggccctggcaacaccaggtgtgtgccaggaatgtgggaaagcaggcaatggcaatcacctcagccaccacagcctctctcctcctcaaccagtctgttcctcagcctccactccacctgccccagcctgaaggtggcatcaagggcaaggagggctatgctagggatgctggctagataaatggacccatgagttgggagcaagaaaattgtccttcaaacaccaaagatttcaaggattgggggaagggagggtgtgtgtcagtcagcctcatttcccagagaacaagagcaactcaagccacaccagaaagaggcaggaaaggggggagaggttctattcccagcttctgatctggagccagcagacaggctgggagatggggaactgagagggggaagttagagcagctgacttggtctcagccggattagcagagggcagctaaagaaaggttgtacccaaggccactgcaggcagagtccaagctgggggagggggctgcagcgatgttctgaatctgtgatccttgaaactcctttccttgggctgctaacagatccattgagggtgatatggagcagctggagttccctgtacacccacactctgcccaaagcgattgtgtctctggctaggtgagctgcccagcacaggacttgggaaacactcagagtccagacgaccaggtacctaaggactgatcagactgtgatgaggaggattgggaagaggcggatgggtggttccagggtccaagcctttccttgttctgccagaggtaagagcagtgagaagagatgacttccacttcccatggaaattaaggctggtcagggtaggggcatggtcagaggaggcggctggaggggatgcccaggcccacaatgcccagcaaccacctgccagcccctgggagcattaacctccgctccatggcctctcccagccccatattttctagaaggagatactggcagtagctggagagaccctgacagttatagggaacccagtagtagaataaggaggatggggagacgaaacaaaaggttcaagttgaaaaagtctgaaaagcacgggatgtcatagagaatgcccccttttcccccagcgcgttatcagcgcttcttagactcaggggcgtccgccaacttgtttacaaaatgaggaaggttaggaaacaaacttgggacggcattcccaggaggtccctgttatcctcccagcatcccccgcccccacgcctccctgtggtccgcctacgcggaactctgcggccggcagcggtcccctccctctcccgggccgcgaccccgccgacccgcgccaaatacatggagatcaacaaagtcacgcttccgagtcacgtggccagtgttttcctccctccgcgggcgggctgggggcgcgcgaggaggggcgccgcgagtctgaggagcggggggcggtgacagcgcccgcctcccgccgcgggactccggccgccacgggacccccgccccgcctcggccccttcggcagctcggcctgccgaagtccggtggccaggccggtgggctccagccgcgccgggcactggctcgctcgctcgctcactcaccacagtgaccggggacaccatggcggcggcggcggcggctggcaccctgctccgggctgcagcggccaggacgcgcccacggccaggtaagccggcgacgattctacaaagcccggagggacggacaatacctcccgagcgcccggcgcccgggttctgtcagctagccccgtgacgtcaccgctgccagggccaatgagcgggcgggagccgggggggcggggcccggctggcggcgccggccaggcccccggctgctgctcggagaaaggaggcatctccccaggggtcagaaggcggataccccccaggccccgcccccttgggaggccgtgccaaggcgtccacggaacgtgaacgtgaccgtgaccccggtgcctgggtgaggactgagcttggctgagagacaaacacattgctgtcctggacgcacagccacatacattttctcataacccgggagcaaaaggcaaagacagattcccttaagcctttaaacatgcagtccacgccgatacgattgcaattggactcacaaccttcactgtgtacaaacacacatccaaatcatcagcaaacacacaaccttcgacttga
